(19) United States
(12) Patent Application Publication
(10) Pub. No.: US 2024/0191298 A1
(43) Pub. Date: Jun. 13, 2024

(54) DNA-BARCODED ANTIGEN MULTIMERS AND METHOD OF USE THEREOF

(71) Applicant: BOARD OF REGENTS, THE UNIVERSITY OF TEXAS SYSTEM, Austin, TX (US)

(72) Inventors: Ning JIANG, Austin, TX (US); Shuqi ZHANG, Austin, TX (US); Keyue MA, Austin, TX (US); Chenfeng HE, Austin, TX (US); Alexandra A. SCHONNESEN, Austin, TX (US)

(73) Assignee: BOARD OF REGENTS, THE UNIVERSITY OF TEXAS SYSTEM, Austin, TX (US)

(21) Appl. No.: 18/534,150

(22) Filed: Dec. 8, 2023

Related U.S. Application Data
(63) Continuation of application No. 17/046,581, filed on Oct. 9, 2020.
(60) Provisional application No. 62/655,317, filed on Apr. 10, 2018.
(60) Provisional application No. 62/719,007, filed on Aug. 16, 2018.

(51) Int. Cl. C12Q 1/6881

(52) U.S. Cl. CPC C12Q 1/6881; C12Q 2531/113; C12Q 2563/185

(57) ABSTRACT

Provided herein are methods compositions and methods to generate pMHC libraries, and methods of using the pMHC libraries to determine the sequences of T cell receptors, and T cell developmental and activation status.

### CROSS REFERENCES TO RELATED APPLICATIONS

[0001] This application is a continuation of U.S. application Ser. No. 17/046,581, filed Oct. 9, 2020, which is a US National Phase 371 application from International Application No. PCT/US2019/026757, filed Apr. 10, 2019, which claims the benefit of U.S. Provisional Application No. 62/655,317, filed Apr. 10, 2018, and U.S. Provisional Application No. 62/719,007, filed Aug. 16, 2018, all of which are hereby incorporated herein by reference in their entirety.

[0002] This invention was made with government support under Grant Nos. R00 AG040149, S10 OD020072, and R33 CA225539 awarded by the National Institutes of Health. The government has certain rights in the invention.

### SEQUENCE LISTING

[0003] A Sequence Listing conforming to the rules of WIPO Standard ST.26 is hereby incorporated by reference. Said Sequence Listing has been filed as an electronic document via PatentCenter encoded as XML in UTF-8 text. The electronic document, created on Dec. 1, 2023, is entitled “1414754_ST26.xml”, and is 5,768,330 bytes in size.

### BACKGROUND

### 1. Field

[0004] The present disclosure relates generally to the field of immunology. More particularly, it concerns the generation of pMHC molecules and their use in detecting T cells.

### 2. Description of Related Art

[0005] Each CD8⁺ T cell can potentially recognize multiple species of peptides bound by Major Histocompatibility Complex (pMHC) Class I molecules on the surface of most nucleated cells using a distinct TCR. This TCR-mediated reactivity and cross-reactivity affects the quality of the immune response in viral infection (Mongkolsapaya et al., 2003), auto-immune diseases (Lang et al., 2002), and cancer immunotherapy (Cameron et al., 2013). Thus, the ability to identify the antigenic peptide or peptides recognized by a T cell and its T cell receptor (TCR) sequence is essential for the monitor and treatment of immune-related diseases.

[0006] Fluorescent pMHC tetramers are widely used to identify antigen-binding T cells (Newell and Davis, 2014). While combinatorial tetramer staining can expand the number of peptides that can be interrogated, fluorescence spectral overlapping limits the number of peptides that can be examined at a time, not to mention the extent of cross-reactivity (Newell and Davis, 2014). Using isotope-labeled pMHC tetramers, mass cytometry, such as by CyTOF® (Fluidigm®), can interrogate an even larger number of peptides; however, examining cross-reactivity has not been demonstrated. Furthermore, the destructive nature of CyTOF® prohibits linking of pMHCs bound by a T cell to its TCR sequence (Newell and Davis, 2014).

[0007] DNA-barcoded pMHC multimer technology has been used for the bulk analysis of antigen-binding T cell frequencies for more than 1000 pMHCs (Bentzen et al., 2016). However, with bulk analysis, information on the binding of peptides to individual T cells is lost and cross-reactivity cannot be assessed at single cell level, which limits the assessment of cross-reactivity in primary T cells, such as T cells in clinical samples. It also remains challenging to link peptides with the individual TCR sequences that they bind to for a large number of peptides in hundreds of single T cells simultaneously. This information is valuable for tracking antigen-specific T cell lineages in disease settings, TCR-based therapeutics development (Stronen et al., 2016), and for uncovering patterns in TCR recognition (Glanville et al., 2017). One further limitation of current multimer-based methods is that while the peptide library size can be scaled up, each peptide must still be chemically synthesized for each pMHC species (Rodenko et al., 2006). The high cost associated with chemically synthesized peptides prevents the quick generation of a pMHC library that can be tailored to any pathogen or disease. Clearly, there exists a need for methods to quickly and cost effectively generate pMHC libraries to investigate T cells.

### SUMMARY

[0008] In some embodiments, the present disclosure provides compositions and methods to generate DNA barcode labeled pMHC or peptide antigen multimer libraries for hundreds or thousands of peptides, and methods of using the pMHC or peptide antigen multimer libraries to determine the following linked information at single cell level for individual T or B cells: sequences of T or B cell receptors, antigen specificity, T or B cell transcriptomic or gene expression level, and proteogenomics by the expression level of protein markers inside or on the surface of T or B cells at single cell level for individual T or B cells. This linked information is then used to assess T or B cell developmental, activation status, clonal expansion status, phenotype, antigen specificity, and funcation in different physiological or pathological conditions, such as infection, vaccination, allergy, autoimmune diseases, cancer, aging, and neurodegenerative diseases. TCR or BCR sequences and antigen sequences can be used as therapeutics in difference diseases or vaccine. The status of T or B cell developmental, activation status, clonal expansion status, phenotype, antigen specificity, and funcation can be used for immune profiling, disease early diagnosis, therapeutics development, prognosis, treatment progress monitoring, and treatment responder or non-responder separation.

[0009] In some embodiments, the present disclosure provides compositions and methods to generate pMHC libraries, and methods of using the pMHC libraries to determine the sequences of T cell receptors, and T cell developmental and activation status.

[0010] In a first embodiment, there is provided a composition comprising multimer backbone linked to a peptide-encoding oligonucleotide.

[0011] In some aspects, the multimer backbone comprises 2, 3, 4, 5, 6, 7, 8, 9, 10, or more protein subunits. In particular aspects, the multimer backbone is a dimerization antibody, engineered antibody Fab′ or similar construct that binds to a universal moiety either on a peptide or pMHC, such as the FLAG portion of the peptide or biotin, to dimerize antigens. In certain aspects, the multimer backbone is a tetramer formed by streptavidin or other similar proteins. In some aspects, the multimer backbone is a pentamer, octamer, streptamer (e.g., formed by Strep-tag), or dodecamer (e.g., formed by tetramerized streptavidin). In some aspects, the protein subunits comprise streptavidin or a glucan. In certain aspects, the glucan is dextran.

[0012] In certain aspects, the peptide-encoding oligonucleotide is further linked to a DNA handle. In some aspects, the peptide-encoding oligonucleotide is linked to the DNA handle by annealing and PCR. In some aspects, the peptide-encoding oligonucleotide is linked to the DNA handle by annealing without PCR. In some aspects, the DNA handle is an oligonucleotide comprising a first sequencing primer and a barcode. In some aspects, the barcode comprises a 8-20, such as 10-14, such as 8, 9, 10, 11, 12, 13, 14, 15, 16, 17, 18, 19, or 20, base pair degenerate sequence. In some aspects, the degenerate sequence has one or more fixed nucleotides in the middle. In particular aspects, the barcode comprises a 12 base pair degenerate sequence. In some aspects, the DNA handle further comprises a specific nucleotide sequence whose corresponding amino acid sequence can be recognized by certain proteases, such as partial FLAG (DDDDK), IEGR, or IDGR. In some aspects, the nucleotide sequence, whose amino acid sequence is recognized by proteases starts with ATG. In some aspects, the peptide-encoding oligonucleotide is further linked to a second sequencing primer.

[0013] In certain aspects, the DNA handle is linked to the multimer backbone. In some aspects, DNA barcodes denoting each type of pMHC multimer are annealed. In certain aspects, the annealing is followed by PCR. In particular aspects, each type of the pMHC multimer in the final pool has a similar DNA:multimer backbone ratio. In some aspects, the ratio of the DNA handle to multimer backbone is between 0.1:1 to 20:1, such as 0.1:1 to 1:1, 1:1 to 2:1, 2:1 to 3:1, 3:1 to 4:1, 4:1 to 5:1, 5:1 to 6:1, 6:1 to 7:1, 7:1 to 8:1, 8:1 to 9:1, 9:1 to 10:1, 10:1 to 11:1, 11:1 to 12:1, 12:1 to 13:1, 13:1 to 14:1, 14:1 to 15:1, 15:1 to 16:1, 16:1 to 17:1, 17:1 to 18:1, 18:1 to 19:1, or 19:1 to 20:1.

[0014] In some aspects, the multimer backbone is further linked to one or more detectable moieties. In particular aspects, the one or more detectable moieties comprise the barcode in the DNA handle and/or a fluorophore. In some aspects, the DNA handle or peptide-encoding oligonucleotide is linked to the detectable label. In certain aspects, the DNA handle is covalently linked to the detectable label. In particular aspects, the covalent link is a HyNic-4FB crosslink, Tetrazine-TCO crosslink, or other crosslinking chemistries. In certain aspects, the detectable moieties are attached to the multimer backbone or to the peptide-encoding oligonucleotide. In some aspects, the one or more detectable moieties are fluorophores. In some aspects, the fluorophore is a PE, PE-Cy5, PE-Cy7, APC, APC-Cy7, Qdot 565, qdot 605, Qdot 655, Qdot 705, Brilliant Violet (BV) 421, BV 605, BV 510, BV 711, BV786, PerCP, PerCP/Cy5.5, Alexa Fluor 488, Alexa Fluor 647, FITC, BV570, BV650, DyLignt 488, Dylight 649, and/or PE/Dazzle 594. In particular aspects, the fluorophores are R-phycoerythrin (PE) and allophycocyani (APC).

[0015] In certain aspects, the composition further comprises at least two peptide-major histocompatibility complex (pMHC) monomers linked to the multimer backbone. In some aspects, the composition comprises between 2 and 12, such as 2, 3, 4, 5, 6, 7, 8, 9, 10, 11, or 12, pMHC monomers.

[0016] In some aspects, the peptide-encoding oligonucleotide encodes a peptide identical to the peptide of the pMHC monomers. In some aspects, the peptide-encoding oligonucleotide comprises DNA. In certain aspects, the peptide-encoding oligonucleotide further comprises a 5′ primer region and/or a 3′ primer region.

[0017] In some aspects, the sequence of the DNA handle is constant and the sequence of the peptide-encoding oligonucleotide is variable.

[0018] In certain aspects, the pMHC monomers are biotinylated. In some aspects, the pMHC monomers are attached to the streptavidin by streptavidin-biotin interaction.

[0019] In some aspects, the composition comprises a pMHC tetramer. In other aspects, the composition comprises a pMHC pentamer.

[0020] In another embodiment, there is provided a method for generating a DNA-barcoded pMHC multimer comprising performing in vitro transcription/translation (IVTT) on a peptide-encoding oligonucleotide comprising a DNA handle, thereby obtaining the target peptide antigens; loading the peptides onto MHC monomers to produce pMHC monomers; and binding the pMHC monomers to a multimer backbone linked to a oligonucleotide comprising a DNA handle that peptide encoding oligonucleotides can use to attach or extend themselvese to the multimer backbone, thereby obtaining the DNA-barcoded pMHC multimer. In particular aspects, the DNA-barcoded multimer is a multimer of the composition of any of the above embodiments or aspects thereof. In some aspects, the MHC monomers are biotinylated. In certain aspects, the multimer backbone comprises streptavidin or streptamer. In some aspects, the multimer backbone comprises dextran. In some aspects, the DNA-barcoded fluorescent pMHC multimer is further defined as a DNA-barcoded fluorescent pMHC multimer. In some aspects, the DNA-barcoded pMHC multimer is further defined as a DNA-barcoded pMHC tetramer, pentamer, octamer, or dodecamer.

[0021] In some aspects, the method further comprises amplifying the peptide-encoding DNA oligonucleotide by PCR to add IVTT adaptors to the peptide-encoding oligonucleotide prior to performing IVTT. In some aspects, the DNA handle is an oligonucleotide comprising a first sequencing primer, a barcode, and a partial FLAG sequence. In particular aspects, the DNA handle has a constant sequence and the peptide-encoding oligonucleotide has a variable sequence. In particular aspects, the barcode comprises a 12 base pair degenerate sequence.

[0022] In some aspects, the peptide-encoding DNA oligonucleotide comprises a partial FLAG peptide at the N-terminus. In specific aspects, the partial FLAG peptide is cleaved by enterokinase after performing IVTT.

[0023] In some aspects, the peptide-encoding DNA oligonucleotide comprises a IEGR or IDGR at the N-terminus. In specific aspects, the IEGR or IDGR peptide is cleaved by factor Xa after performing IVTT.

[0024] In certain aspects, loading comprises contacting the target peptide library with MHC monomers comprising UV-cleavable temporary peptides and applying UV light to exchange the temporary peptides with the library peptides. In some aspects, loading comprises contacting the target peptide library with MHC monomers comprising non-library peptides and chemically exchanging the peptides to generate pMHC monomers. In some aspects, loading comprises unfolding the MHC monomers to release non-target peptides, contacting the unfolded MHC monomers with the target peptide library, and refolding the MHC monomers with the target peptide library to generate the pMHC monomers. In certain aspects, loading comprises contacting the MHC monomers with the target peptide library and performing CLIP peptide exchange to generate pMHC monomers. In certain aspects, loading comprises contacting the target peptide library with MHC monomers comprising temperature-sensitive temporary peptides and applying a different temperature to exchange the temporary peptides with the library peptides.

[0025] In some aspects, the DNA-barcoded pMHC or peptide multimer further comprises one or more detectable moieties. In certain aspects, the one or more detectable moieties are fluorophores. In some aspects, the fluorophores are PE, PE-Cy5, PE-Cy7, APC, APC-Cy7, Qdot 565, qdot 605, Qdot 655, Qdot 705, Brilliant Violet (BV) 421, BV 605, BV 510, BV 711, BV786, PerCP, PerCP/Cy5.5, Alexa Fluor 488, Alexa Fluor 647, FITC, BV570, BV650, DyLignt 488, Dylight 649, and/or PE/Dazzle 594. In particular aspects, the fluorophores are R-phycoerythrin (PE) and/or allophycocyani (APC).

[0026] In certain aspects, the barcoded peptide-encoding DNA oligonucleotide is generated by annealing the peptide-encoding oligonucleotide of step (a) to a linker oligonucleotide comprising a (1) region complementary to the peptide-encoding DNA oligonucleotide, (2) a barcode, and (3) a 5′ primer region and performing overlap extension. In particular aspects, the barcode is a 12 base pair degenerate sequence. In some aspects, the region complementary to the peptide-encoding DNA oligonucleotide is a partial FLAG sequence. In certain aspects, the linker oligonucleotide further comprises at least one spacer. In some aspects, the spacer is a C12 spacer and/or C18 spacer. In some aspects, the linker oligonucleotide comprises 2 spacers. In some aspects, the linker oligonucleotide further comprises an amine group. In certain aspects, the linker oligonucleotide is linked to the polymer conjugate by a covalent linkage. In particular aspects, the linker oligonucleotide is linked to the polymer conjugate by a HyNic-4FB linkage.

[0027] In another embodiment there is provided a method of generating a library of DNA-barcoded pMHC or peptide multimers comprising performing the method of any of the present embodiments by using a plurality of peptide-encoding DNA oligonucleotides. In some aspects, the peptide of each pMHC or peptide monomer is identical to a peptide encoded by the barcoded peptide-encoding DNA oligonucleotide linked to streptavidin for each DNA-barcoded pMHC multimer. In other aspects, the peptide of each pMHC or peptide monomer is different to a peptide encoded by the barcoded peptide-encoding DNA oligonucleotide linked to streptavidin for each DNA-barcoded pMHC multimer. Further provided herein is a DNA-barcoded pMHC multimer library produced by the method of the present embodiments.

[0028] In a further embodiment, there is provided a method for determining the specificity of T cell receptors (TCRs) or B cell receptor (BCR) comprising staining a plurality of T or B cells with a library of DNA-barcoded pMHC or peptide multimers of the embodiments, thereby generating pMHC multimer-bound T cells or peptide multimer-bound B cells; sorting the pMHC multimer-bound T cells or peptide multimer-bound B cells; sequencing the DNA barcode of each pMHC multimer or peptide multimer and the TCR or BCR sequences of the T or B cell bound to said pMHC multimer; and determining the copy number of each DNA-barcoded pMHC multimer bound to the corresponding T cell to determine the TCR specificity.

[0029] In another embodiment, there is provided a method for linking precursor T or B cells to their specific antigens comprising staining a plurality of T or B cells with a library of DNA-barcoded pMHC or peptide multimers of the embodiments, thereby generating pMHC multimer-bound T cells or peptide multimer-bound B cells; sorting the pMHC multimer-bound T cells or peptide multimer-bound B cells; sequencing the DNA barcode of each pMHC or peptide multimer and the TCR or BCR sequences of the T or B cell bound to said pMHC multimer; and determining the copy number of each DNA-barcoded pMHC multimer bound to the corresponding T or B cell to determine the antigen type and the TCR or BCR sequences linked to the antigen.

[0030] In some aspects of the above embodiments, the method may further comprise using the TCR sequences to determine the frequency of T cells for one or more of the target antigens in the DNA-barcoded pMHC or peptide multimer library. In some aspects, the copy number is determined by counting the number of copies of each unique barcode.

[0031] In certain aspects of the embodiments, the sorting comprises performing flow cytometry. In some aspects, flow cytometry uses a fluorophore attached to the pMHC multimer. In certain aspects, the sorting comprises separating tetramer bound T cells from unbound T cells or a sub-population of T cells. In some aspects, separating comprises using flow cytometry or using magnetically labeled antibodies or streptavidin. In certain aspects, sorting is further defined as separating each DNA-barcoded pMHC multimer-bound T cell or peptide multimer-bound B cell into a separate reaction container. In some aspects, the reaction container is a 96-well or 384-well plate. In some aspects, sorting is further defined as separating each DNA-barcoded pMHC multimer-bound T cell or peptide multimer-bound B cell in bulk. In some aspects, the cells are sorted in bulk and dispersed to the reaction container, such as a microwell plate.

[0032] In some aspects of the embodiment, the peptide-encoding oligonucleotide and DNA handle attached to the pMHC-multimer or peptide multimer form a double-stranded DNA with a 3′ polyA overhang. In some aspects of the embodiment, the peptide-encoding oligonucleotide and DNA handle attached to the pMHC-multimer or peptide multimer form a double-stranded DNA without a 3′ polyA overhang. In some aspects, sequencing comprises preparing DNA-sequencing libraries comprising at least one amplification step wherein the primer pair is used to amplify the DNA barcode of the pMHC multimer and a different primer set is used to amplify the TCRα and TCRβ sequences of each T cell. In certain aspects, a set of reverse transcription primers are used to synthesize cDNA from TCRα and TCRβ sequences of each T cell before PCR amplification. In some aspects, preparing DNA-sequencing libraries comprises nested PCR of the DNA barcodes and TCRα and TCRβ sequences of each corresponding T cell. In certain aspects, the primers used in the amplification of the DNA barcode of the pMHC multimer and the TCRα and TCRβ sequences of each corresponding T cell comprise cellular barcodes.

[0033] In certain aspects, determining TCR or BCR specificity of each T or B cell further comprises associating the TCRα and TCRβ or BCR heavy and BCR light chain sequences of the T or B cell with the count of each DNA-barcoded pMHC or peptide multimer that was bound to said T or B cell. In some aspects, the count of each DNA-barcoded pMHC multimer that was bound to said T or B cell comprises subtracting a count of irrelevant pMHC or peptide multimers bound to the T or B cell from the number of each DNA-barcoded pMHC or peptide multimers bound to the T or B cell. In certain aspects, the count of each DNA-barcoded pMHC or peptide multimer that was bound to said T or B cell comprises subtracting a count of each DNA-barcoded pMHC or peptide multimers bound to an irrelevant T or B cell clone from the count of each DNA-barcoded pMHC or peptide multimers from the T or B cell of interest. In some aspects, the count of each DNA-barcoded pMHC or peptide multimer that was bound to said T or B cell comprises subtracting a count of a DNA-barcoded MHC or peptide multimer lacking an exchanged peptide bound to the T or B cell from the count of each DNA-barcoded pMHC or peptide multimer bound to the T or B cell. In certain aspects, the count of each DNA-barcoded pMHC or peptide multimer that was bound to said T or B cell comprises generating a ratio of the MID sequences of the last suspected true binding DNA-barcoded pMHC or peptide multimer and the first suspected false binding DNA-barcoded pMHC or peptide multimer and dividing all DNA-barcoded pMHC or peptide multimers by that ratio.

[0034] In another embodiment, there is provided a method for identifying neoantigen-specific TCRs or BCRs comprising staining a plurality of T cells with a library of DNA-barcoded pMHC or peptide multimers of the embodiments, wherein the library comprises DNA-barcoded pMHC or peptide multimers, wherein the peptides in the DNA-barcoded pMHC or peptide multimer comprise a set of neoantigen peptides and/or a set of wild-type antigen peptides; sorting the T or B cells bound to the DNA-barcoded pMHC or peptide multimers; sequencing the barcodes of the DNA-barcoded pMHC or peptide multimers and the TCRs or BCRs of the corresponding T or B cell; and sorting fluorophores that are only specific to neo-antigen DNA-barcoded pMHC or peptide multimers to identify neoantigen-specific TCRs or BCRs. In some aspects, the peptide is a cancer germline antigen-derived peptide, tumor-associated antigen-derived peptides, viral peptide, microbial peptide, human self protein-derived peptide or other non-peptide T or B cell antigen.

[0035] In some aspects, the peptides in the DNA-barcoded pMHC or peptide multimers comprise a set of neoantigen peptides. In certain aspects, the peptides in the DNA-barcoded pMHC or peptide multimer comprise a set of wild-type antigen peptides. In some aspects, the peptides in the DNA-barcoded pMHC or peptide multimer comprise a set of neo-antigen peptides and a set of wild-type antigen peptides.

[0036] In some aspects, the set of neo-antigen peptides comprise a fluorophore attached to the multimer backbone and the set of wild-type antigen peptides comprise a fluorophore attached to the multimer backbone. In certain aspects, the fluorophore for the neo-antigen peptides is the same as the fluorophore for the wild-type antigen peptides. In some aspects, the fluorophore for the neo-antigen peptides is different from the fluorophore for the wild-type antigen peptides.

[0037] In some aspects, sequencing determines if the T or B cell bound only to the neo-antigen peptide, only to the wild-type antigen peptide, or to both the neo-antigen and wild-type peptides. In some aspects, if the T or B cell only bound the neo-antigen peptide, then the TCR or BCR is neoantigen-specific. In certain aspects, sorting comprises flow cytometry using fluorophore intensity of a fluorophore attached to the pMHC multimer. In some aspects, the sorting comprises separating multimer bound T cells from unbound Tor B cells or a sub-population of T or B cells. In some aspects, separating comprises using magnetically labeled antibodies or streptavidin. In some aspects, sorting is further defined as separating each DNA-barcoded pMHC or peptide multimer-bound T or B cell into a separate reaction container or in bulk. In some aspects, the reaction container is a 96-well, 384-well plate or other tubes.

[0038] In some aspects, the method further comprises repeating the steps over the course of immune therapy to monitor response to therapy. In certain aspects, the method further comprises determining a subject's immune system status and administering treatment. In some aspects, the method further comprises determining the presence of infection, monitoring immune status, and administering treatment to a subject. In some aspects, the method further comprises determining response to a vaccine. In certain aspects, the method further comprises determining the auto-antigen in an autoimmune subject and monitoring response to treatment. In some aspects, the method further comprises generating neoantigen-specific T or B cells using the identified neoantigen-specific TCRs or BCRs.

[0039] Further provided herein is a composition comprising the neoantigen-specific T cells produced by the present embodiments. Further provided is a method of treating cancer in a subject comprising administering an effective amount of the composition of the embodiments to the subject.

[0040] In another embodiment, there is provided a method for identifying antigen cross-reactivity in naïve and/or non-naïve T or B cells comprising obtaining a plurality of neoantigen- and wild type antigen-presenting of DNA-barcoded pMHC or peptide multimers of the embodiments, wherein the neoantigen-presenting DNA-barcoded pMHC or peptide multimers comprise a first fluorophore and the wild-type antigen-presenting DNA-barcoded pMHC or peptide multimers comprise a second fluorophore; staining naïve and/or non-naive T or B cells with a plurality of pMHC or peptide multimers to generate pMHC multimer-T cell complexes or peptide-multimer-B cell complexes; sorting the pMHC multimer-T cells complexes or peptide-multimer-B cell complexes; determining the TCR or BCR sequences for all sorted T or B cells; and sequencing the barcodes of the DNA-barcoded pMHC or peptide multimers and the TCRs or BCRs of the corresponding T cell which bound to the T or B cell to determine if the T or B cell only bound to the neo-antigen pMHC or peptide multimer, only the wild-type antigen pMHC or peptide multimer, or both neo-antigen and wild-type pMHC or peptide multimers, thereby identifying neo-antigens that only induce neo-antigen specific TCRs and do not induce cross-reactive TCRs or BCRs. All of these analysis can be performed on individual patients while waiting for analysis results to inform on treatment option or other medical decision as the use of IVTT allows for the quick generation of the pMHC or peptide library.

[0041] In some aspects, the first fluorophore and the second fluorophore are the same. In other aspects, the first fluorophore and the second fluorophore are different. In some aspects, the sorting is based on fluorescence intensity. In certain aspects, sorting comprises flow cytometry using fluorophore intensity of a fluorophore attached to the pMHC or peptide multimer. In some aspects, the sorting comprises separating multimer bound T or B cells from unbound T or B cells or a sub-population of T or B cells. In some aspects, separating comprises using magnetically labeled antibodies or streptavidin. In some aspects, sorting is further defined as separating each DNA-barcoded pMHC multimer-bound T cell or DNA-barcoded peptide multimer-bound B cell into a separate reaction container or in bulk. In some aspects, the reaction container is a 96-well, 384-well plate or other tubes.

[0042] In some aspects, the method further comprises repeating the steps over the course of immune therapy to monitor response to therapy. In certain aspects, the method further comprises determining a subject's immune system status and administering treatment. In some aspects, the method further comprises determining the presence of infection, monitoring immune status, and administering treatment to a subject. In some aspects, the method further comprises determining response to a vaccine. In certain aspects, the method further comprises determining the auto-antigen in an autoimmune subject and monitoring response to treatment. generating neoantigen-specific T or B cells using the identified neoantigen-specific TCRs or BCRs.

[0043] In a further embodiment, there is provided a method for preparing DNA that is complementary to a target nucleic acid molecule comprising hybridizing a first strand synthesis primer to said target nucleic acid molecule; synthesizing the first strand of the complementary DNA molecule by extension of the first strand synthesis primer using a polymerase with template switching activity; hybridizing a template switching oligonucleotide to a 3′ overhang generated by the polymerase, wherein the template switching oligonucleotide comprises a restriction endonuclease site; extending the first strand of the complementary DNA molecule using the template switching oligonucleotide as the template, thereby generating the first strand of the complementary DNA molecule which is complementary to the target nucleic acid molecule and the template switching oligonucleotide; and amplifying the complementary DNA molecule.

[0044] In some aspects, the first strand synthesis primer comprises a cellular barcode. In some aspects, the first strand synthesis primer comprises or consists of sequences in Table 1. In some aspects, the restriction endonuclease site is a SalI site. In certain aspects, the template switching oligo comprises the sequence of sequences in Table 1. In some aspects, the target nucleic acid molecule is a plurality of target nucleic acid molecules. In certain aspects, the target nucleic acid molecule is RNA, such as mRNA or total RNA. In some aspects, the polymerase with template switching activity and strand displacement is a RNA dependent DNA polymerase. In certain aspects, the polymerase is a PrimeScript reverse transcriptase, M-MuLV reverse transcriptase, SmartScribe reverse transcriptase, Maxima H Minus Reverse Transcriptase, or Superscript II reverse transcriptase. In some aspects, the target nucleic acid molecule is DNA.

[0045] In additional aspects, the method further comprises cleaving the amplified complementary DNA molecules. In some aspects, the method further comprises preparing a sequencing library from the cleaved complementary DNA molecules. In certain aspects, the further comprises adding sequencing adaptors. In some aspects, preparing a sequencing library comprises the use of a Tn5 transposase to add sequencing adaptors. In certain aspects, the sequencing adaptors comprise the sequences depicted in Table 1. In some aspects, preparing a sequencing library comprises the use of custom primers. In some aspects, the custom primers have the sequences depicted in Table 1.

[0046] Further provided herein is a method for analyzing a genome or gene expression comprising preparing a sequencing library by the method of the embodiments, and sequencing the library.

[0047] In another embodiment, there is provided a method for analyzing a gene expression from a single cell comprising providing a single cell; lysing the single cell; preparing a sequencing library by the method of the embodiments, wherein the target nucleic acid is total RNA from the single cell; and sequencing the library. In some aspects, the single cell is a human cell. In certain aspects, the single cell is an immune effector cell. In some aspects, the single cell is a T cell. In some aspects, the single cell is provided by FACS, micropipette picking, or dilution.

[0048] In yet another embodiment, there is provided a method for analyzing gene expression from a plurality of single cells comprising providing a plurality of single cells; staining the plurality of single cells with a plurality of pMHC or peptide multimers prepared by the method of the embodiments; sorting the stained single cells into individual reservoirs; lysing the single cells; concurrently preparing complementary DNA by the method of claim 117 for each of the lysed single cells; cleaving the restriction site of the complementary DNAs; pooling the cleaved complementary DNA of each of the single cells; preparing sequencing libraries from the pooled cleaved complementary DNA; and sequencing the libraries. In some aspects, the single cells are T or B cells. In certain aspects, the T or B cells are naïve T or B cells. In some aspects, the T or B cells are neoantigen binding T or B cells. In some aspects, the method further comprises performing the method of claim 89 for identifying neoantigen-specific TCRs or BCRs. In some aspects, the method is performed in high-throughput by using microdroplet methods, in-drop method, or microwell methods.

[0049] In further embodiments, there are provided additional methods in combination with any of the above embodiments. The above methods provided herein may be used to detect self-antigen specific T or B cells, wherein the self-antigen specific T or B cells cause severe adverse effect after immune checkpoint blockade therapy and other cancer immunotherapy, before a subject is administered a therapy. Also provided herein is a method of detecting T or B cell binding epitopes and further developing the T or B cell binding epitopes into vaccines or TCR or BCR redirected adoptive T or B cell therapy for any pathogens. Further, some embodiments provide a method of using common pathogen and auto-immune disease associated epitopes identified according to the present methods to test and monitor the immune health of individuals and predict individual's protective capacity to infection or likelihood of developing auto-immune diseases and monitoring the early on-set of auto-immune diseases. In addition, there is provided a method of detecting regulatory T or B cell binding epitopes according to the present methods and developing vaccines to eliminate or enhance regulator T or B cell function or number for immunological diseases.

[0050] In further embodiment, there is provided a method for analyzing T or B cell antigen specificity in combination with analyzing TCR or BCR sequences, gene expression and proteogenomics from a single cell comprising generating peptides according to the present embodiments; generating DNA-barcoded pMHC or peptide multimers of the embodiments; staining T or B cells with pMHC or peptide multimer library thereby generating pMHC or peptide multimer-bound T or B cells; sorting the pMHC multimer-bound T cells; sorting the peptide multimer-bound B cells; sequencing the DNA barcode of each pMHC or peptide multimer, the TCR TCR sequences, gene expression and proteogenomics of the T or B cell bound to said pMHC multimer; and determining the copy number of each DNA-barcoded pMHC or peptide multimer bound to the corresponding T or B cell to determine the TCR or BCR specificity.

[0051] In certain aspects, the peptide-encoding oligonucleotide is linked to the DNA handle by annealing. In some aspects, the DNA handle is an oligonucleotide comprising a first universal primer and a specific nucleotide sequence, whose corresponding amino acid sequence can be recognized by certain proteases, such as partial FLAG (DDDDK), IEGR, IDGR. In some aspects, the nucleotide sequence, whose amino acid sequence are recognized by proteases starts with ATG. In some aspects, the peptide-encoding oligonucleotide comprises a partial FLAG, IEGR or IDGR peptide at the N-terminus. In some aspects, the peptide-encoding DNA oligonucleotide is further linked to a second sequencing primer. In some aspects, the peptide-encoding oligonucleotide further comprises a polyA sequence with a length ranging from 18-30, such as 18, 19, 20, 21, 22, 23, 24, 25, 26, 27, 28, 29, or 30 base pairs. In certain aspects, the last 2-4 polyA nucleotides, such as 2, 3, or 4 nucleotides are bound by phosphothioate bonds. In certain aspects, the DNA handle is linked to the multimer backbone.

[0052] In certain aspects, the peptide-encoding oligonucleotide can be substituted with random generated oligonucleotides. Random generated oligonucleotides can comprise a partial FLAG, IEGR or IDGR peptide at the N-terminus, a random generated oligonucleotide barcode between 8-30 bp, such as 8, 9, 10, 11, 12, 13, 14, 15, 16, 17, 18, 19, 20, 21, 22, 23, 24, 25, 26, 27, 28, 29 or 30 base pairs, and a polyA sequence with a length ranging from 18-30, such as 18, 19, 20, 21, 22, 23, 24, 25, 26, 27, 28, 29, or 30 base pairs. In certain aspects, the last 2-4 polyA nucleotides, such as 2, 3, or 4 nucleotides are bound by phosphothioate bonds. In certain aspects, the DNA handle is linked to the multimer backbone.

[0053] In another embodiment, there is provided a method for the use of any of the present embodiments with single cell gene expression analysis platforms. In some aspects, the platform is the BD BD Rhapsody™ Single-Cell Analysis System, or single cell RNA sequencing (scRNA-seq) platforms, such as 10× genomics Chromium, 1CellBio inDrop or Dolomite Bio Nadia. In some aspects, the method is combined with DNA-labeled antibody sequencing, such as CITE-seq or REAP-seq or commercially available DNA-labeled antibodies, such as BD Ab-seq products or Biolegend TotalSeq.

[0054] The present method including the TetTCR-Seq, single cell gene expression or scRNA-seq, and DNA-labeled antibody sequencing is referred to herein as TetTCR-SeqHD. TetTCR-SeqHD can use peptide or antigen encoding oligonucleotides with poly A tail or random oligonucleotides with poly A tail barcoding antigen speicficity added to the 3′end to interface with scRNA-seq protocols that high-throughput scRNA-seq platforms use. In some aspects, the DNA linker oligonucleotide or DNA handle is covalentely linked to streptavidin in order to complementary bind peptide-encoding DNA oligonucleotide or random oligonucleotide barcoding antigen speicficity. In some aspects, the method only comprises annealing to link the peptide-encoding DNA oligonucleotide to the streptavidin. MID or UMI and cell barcodes from high-throught platforms during reverse transcription may be used. Reverse transcription using primers containing polyT in the above single cell analysis platforms can generate cDNA of peptide-encoding DNA oligonucleotide for each individual cell.

[0055] In some aspects, the proteinase is not limited to enterokinase, enteropeptidase or factor Xa. Any enzyme with a specific cleavage site and the peptides encoding the cleavage site can be used here to construct the DNA handle or liner sequences and paired with that enzyme in generating peptides.

[0056] In particular aspects, the reverse transcription part of TetTCR-SeqHD is compatible with single cell RNA sequencing protocols, such as Smart-seq and Smart-seq2 protocols. In certain aspects, amplification of the peptide or antigen encoding oligos with poly A tail or random oligonucleotide with poly A tail barcoding antigen specificity is accomplished using the single cell gene expression analysis platforms or single cell RNA sequencing protocols, such as Smart-seq and Smart-seq2 protocols or by adding a primer that anneals to the 5′ end of the peptide or antigen encoding oligos with poly A tail or random oligonucleotide with poly A tail barcoding antigen specificity.

[0057] Further provided herein is a method to generate a set of peptides using oligonucleotides that encode the peptides but without a polyA tail by using a separate set of random barcoded oligonucleotides with a long poly A tail to covalently attach to a multimer backbone via a DNA linker or handle. The random barcoded oligonucleotides with poly A tail can be used in the reverse transcription. This set of random barcoded oligonucleotides with poly A tail can be re-used between cohort of samples or patients while only changing the short oligonucleotides that encode peptide to match specific antigens one wants to test in the sample or neo-antigens identified in individual patients.

[0058] In some aspects of any of the above embodiments, the methods comprise reading of the antigen specificity by qPCR without performing sequencing. This method can be applied to a set of pre-defined oligonucleotides that are used to denote peptide antigens.

[0059] In a further embodiment, there is provided a method comprising reading antigen specificity by qPCR without performing sequencing in combination the with above embodiments.

[0060] In another embodiment, there is provided a method to determine whether predicted cancer antigens or foreign antigens or self-antigens are presented by MHC on cancer cells or virally infected host cells or host cells comprising generating a pMHC multimer library by according to the embodiments; using the pMHC multimer library to identify polyclonal T cells from patients or healthy individuals to culture; expanding polyclonal T cell culture and exposing the T cells to either cancer cells, virally infected cells or host cells to be activated by antigens presented by their MHC molecules; and performing TetTCR-Seq or TetTCR-SeqHD to examine the antigen specificity and activation status at single T cell level to determine which antigen-recognizing T cells have been activated, which indicates the existence of that antigen or antigens on the surface of target cells that T cells were exposed to.

[0061] In a further embodiment, there is provided a method of identifying linked antigen targets and recognizing B cell receptors or antibodies according to the embodiments.

[0062] Further provided herein is a method of detecting self-antigen specific T or B cells according to the embodiments, wherein the self-antigen specific T or B cells cause severe adverse effect after immune checkpoint blockade therapy in a disease, preventive vaccine or therapeutic vaccine.

[0063] In another embodiment, there is provided a method of detecting T or B cell binding epitopes according to the embodiments and developing the T or B cell binding epitopes into vaccines or TCR or B cell receptor redirected adoptive T or B cell therapy or antibody-based therapies in a disease, preventive vaccine or therapeutic vaccine.

[0064] A further embodiment provides a method of using pathogen and autoimmune disease-associated protein epitopes identified according to the embodiments to monitor the immune health of a subject by associated T or B cell number changes or associated gene signature of T or B cells in a disease, preventive vaccine or therapeutic vaccine.

[0065] A method of detecting regulatory T or B cell binding epitopes according to any one of claims 1-178 and developing vaccines to eliminate or enhance regulator T or B cell function or number for a disease or preventive vaccine or therapeutic vaccine.

[0066] In any of the above embodiments, the disease or preventive vaccine or therapeutic vaccine is in cancer, an infectious disease, autoimmune disease, autoimmune disease, neurodegenerative disease, allergy, asthma, organ transplantation, bone marrow transplantation, trauma, wound, psychological diseases, cardiovascular diseases, diseases of the endocrine system, diseases of any organ or tissue or cells of the human body, or aging.

[0067] Other objects, features and advantages of the present invention will become apparent from the following detailed description. It should be understood, however, that the detailed description and the specific examples, while indicating certain embodiments of the invention, are given by way of illustration only, since various changes and modifications within the spirit and scope of the invention will become apparent to those skilled in the art from this detailed description.

### BRIEF DESCRIPTION OF THE DRAWINGS

[0068] The following drawings form part of the present specification and are included to further demonstrate certain aspects of the present invention. The invention may be better understood by reference to one or more of these drawings in combination with the detailed description of specific embodiments presented herein.

[0069] FIGS. 1A-1I: Workflow for generation of DNA-BC pMHC tetramer library and proof-of-concept of using TetTCR-Seq for high-throughput linking of antigen binding to TCR sequences for single T cells. (a) Workflow for generation of DNA-BC pMHC tetramers. Grey text boxes denote step order and names. (b) DNA-BC pMHC tetramer libraries are used to stain and isolate rare antigen-binding T cell populations from primary human CD8⁺ T cells by magnetic enrichment. Cells are single-cell sorted into lysis buffer and RT-PCR is performed to amplify both the TCRαβ genes and the DNA-BC to determine the pMHC specificities by NGS. Shown is Experiment 1, a proof-of-concept, using a 96 peptide library to link antigenic peptide binding to TCR sequences for hundreds of single T cells. (c) CMV-NLV peptide generated from either IVTT or conventional synthetic (Syn) method were used to form pMHC tetramers in order to stain either a cognate or a non-cognate T cell clone. (d) MID counts per peptide detected on single T cells sorted from the Tetramer fraction in Experiment 1 (16 out of 768 peptides, aggregated from 8 cells, had >0 MID counts). Dashed line represents MID threshold for identifying positively bound peptides. (e) Peptide rank curve by MID counts for each of top 10 ranked peptides in the order of high-to-low for single sorted cells from the spike-in clone (8 cells) in Experiment 1. Black dashed line represents MID threshold for identifying positively bound peptides as defined in (d). Each solid line represents the MID counts for each of the 96 peptides that can potentially bind on a single cell with only top 10 peptides, by MID counts, are shown. Blue solid lines indicate cells with at least one positively binding peptide; Inset pie charts indicate proportion of cells with the indicated number of positively binding peptides. (f) Fluorescent intensity of the HCV-KLV(WT) binding T cell clone, used as spike-in in Experiment 1, stained individually with the indicated pMHC tetramers, generated using Syn peptides, in a separate validation experiment. (g) Peptide rank curve by MID counts as in (e) for the Tetramer⁺ primary T cell populations (167 cells) in Experiment 1. Black dashed line and blue solid lines are similarly defined as in (e). Grey solid lines indicate cells that did not positively bind any peptides based on the criteria discussed at the beginning of the Supplementary Information. (h) Calculated frequencies of antigen-binding T cell populations in total CD8⁺ T cells for peptide antigens with at least 1 detected T cell, separated by phenotype. (i) V-gene usage of unique TCR sequences that are specific for YFV_LLW (naïve and non-naïve combined, n=11 for TRAV, n=15 for TRBV) or MART1 A2L (naïve and non-naïve combined, n=33 for TRAV, n=43 for TRBV). Fl, fluorescence intensity. MFI, Median Fluorescence Intensity. a.u., arbitrary unit. APL, altered peptide ligand.

[0070] FIGS. 2A-2H: High prevalence of neo-antigen binding T cells that cross-react to WT counterpart peptides and high-throughput isolation of neo-antigen-specific TCRs for multiple specificities in parallel using TetTCR-seq. (a-c) Experiment 3, isolation of single Neo and/or WT binding T cells from a healthy donor using a 40 Neo-WT antigen library. (a) DNA-BC pMHC tetramer staining profile of naïve CD8⁺ T cells from the tetramer pool-enriched fraction. (b) Relative proportion of T cells among the three possible antigen binding combinations (Neo⁺WT⁻, Neo⁻WT⁺, Neo⁺WT⁺) for each Neo-WT antigen pair from Experiment 3. Data was filtered to only include pairs where both peptides were or detected in at least one cell, and have at least 3 detected cells total (149 cells, see Methods). (c) Neo-antigens in (b) were grouped based on mutation positions, middle (4-6) or fringe (1-3, 7-9). Statistical test was performed between the two groups on associated percentage of cross-reactive T cells as red bars shown in (b). Each circle denotes one Neo-WT antigen pair (n=11, One-tailed Mann Whitney U-Test). (d-f) Experiment 5 and 6, isolation of Neo and/or WT binding T cells using a 315 Neo-WT antigen library. (d) DNA-BC pMHC tetramer staining profile of naïve CD8⁺ T cells from the tetramer pool-enriched fraction for Experiment 5. See Supplementary FIG. 15 for gating scheme. (e) Percent cross-reactive T cells for Neo-WT antigen pairs based on the mutation position of the neo-antigen. Same data filter as (b) is used. Each circle denotes one Neo-WT pair (n=517 cells, see Supplementary Information). (f) Neo-antigens in (e) were grouped based on mutation position (left) or PAM1 value (right). Red bars denote median. Statistical test was performed between the two groups as indicated on associated percentage of cross-reactive T cells as shown in (e). (n=62, One-Tailed Mann Whitney U-Test). (g) LDH cytotoxicity assay on in vitro expanded primary T cell lines sorted using DNA-BC pMHC tetramers as in (a) interacting with T2 cells pulsed with the 20 neo-antigen peptide pool or 20 WT counterpart peptide pool. Each pair of black/grey bars represent one T cell line derived from sorting 5 cells from one of the three indicated populations in (a). Each condition was performed in triplicates. Standard deviation is shown for each condition. (h) Fluorescent intensity histogram of Jurkat 76 cell line transduced with TCRs from Experiment 3 and 4 stained with indicated tetramers. One TCR, AB5, was identified to only recognize the neo-antigen, GANAB_S5F, while the other TCR, M11, was identified to be cross-reactive to both the neo-antigen, GANAB_S5F and its WT counterpart, GANAB, from TetTCR-Seq. Fl, fluorescence Intensity. a.u., arbitrary unit.

[0071] FIGS. 3A-3E: pMHC tetramers produced by IVTT has similar staining performance as the conventional method using chemically synthesized peptide. (a-e) pMHC tetramers, containing the indicated peptide, were generated using IVTT or chemically synthesized and used to stain a cognate and non-cognate T cell clone. Anti-CD8a (RPA-T8) was present throughout the staining.

[0072] FIGS. 4A-4F: IVTT can generate 20-100 μM of the desired peptide. (a-f) Peptides generated from either IVTT or the traditional, synthetic peptide method were diluted at different ratios and were used to form PE labeled pMHC tetramers. Starting concentration of synthetic peptide is 100 μM for all peptides. These pMHC tetramers were used to stain a cognate T cell clone. Anti-CD8a (RPA-T8) was present throughout the staining. MFI: Median Fluorescence Intensity. a.u.: arbitrary unit.

[0073] FIGS. 5A-5D: Covalent attachment of DNA-BC to PE and APC streptavidin does not affect staining intensity of the resulting tetramers. (a-d) PE and APC labeled streptavidin were covalently attached with DNA linker at a molar ratio of 3-7 streptavidin molecules per one molecule of DNA-BC. An oligonucleotide encoding HCV-KLV(WT) was annealed to streptavidin-conjugated DNA linker and extended to form DNA-BC. DNA-BC pMHC tetramers were formed with either the HCV-KLV(WT) or TYR-YMD peptide and with either PE or APC streptavidin scaffold, as indicated. Resulting tetramers were used to stain a cognate and non-cognate T cell clone. Anti-CD8a (RPA-T8) was present throughout the staining. Fl: fluorescence intensity. a.u.: arbitrary unit.

[0074] FIGS. 6A-6E: Quantification of the detection limit of DNA-BC pMHC tetramers. (a) Fluorescence of PE-Quantibrite™ beads that were used for (b) calibration of PE fluorescence intensity to protein abundance. (c) PE labeled, DNA-BC pMHC tetramers containing the HCV-KLV(WT) peptide (with the DNA-BC corresponding to HCV-KLV(WT) sequence) was used to stain a cognate T cell clone at the indicated tetramers dilutions starting at 5 μg/ml for 1×. Anti-CD8a (RPA-T8) was present throughout the staining. (d) Calculation of tetramer abundance on each of the staining dilutions from (c) using the calibration curve from (b). Corrected value indicates subtraction of background value from the unstained cell population. (e) qPCR of DNA-BC on single cells sorted from various populations. Tet Dilution 1×-625× are the 5 tetramer dilutions from (c), amplified with primers specific for DNA-BC encoding the HCV-KLV(WT) sequence. Negative control #1 is a GP100-IMD binding T cell clone that has been stained with 1× dilution of the DNA-BC HCV-KLV(WT) tetramer as in (c), amplified with primers specific for DNA-BC encoding the HCV-KLV(WT) sequence. Negative control #2 is two PE labeled DNA-BC pMHC tetramer were made containing the HCV-KLV(WT) or GP100-IMD peptide. Each tetramer contains a DNA-BC sequence that corresponds to the peptide. The two tetramers were pooled and used to stain the HCV-KLV(WT) binding clone in (c) at 5 μg/ml each (none diluted). qPCR was performed using primers specific for DNA-BC encoding GP100-IMD only (which corresponds to bound GP100-IMD tetramer). Each circle indicates a qPCR reaction with one sorted cell. 0 Cq value represents no detected amplification after 40 cycles. Red bars indicate the mean Cq value for positively amplified cells.

[0075] FIGS. 7A-7D: Gating scheme and sorting strategy for Experiment 1 and 2. (a) Representative gating scheme for Experiment 1 and 2. Shown is gating scheme for Experiment 1. Single-cell lymphocytes were first gated. The HCV-specific T cell clone spike-in, pre-stained with BV605-CD8a, and the primary T cell population, stained with BV785-CD8a, were isolated. CD8⁺ T cells were gated to be 7-AAD⁻CD3⁺. Naïve and non-naïve antigen-binding cells were sorted from the PE⁺, endogenous peptides and APC⁺, foreign peptides. The same antibody panel and gating scheme is used for Experiment 2. (b) Tetramer staining of flow-through fraction was used to set the PE and APC tetramer negative and positive gates. An example from Experiment 1 was shown. (c) Frequency of the four antigen-binding T cell populations for Experiment 1 and 2. (d) Percent of naïve cells from Foreign and Endogenous Tetramer⁺ CD8+ T cells for Experiment 1 and 2. Bulk indicates flow-through CD8+ T cells from the same experiment. (d) Frequency of the four antigen-binding T cell populations for Experiment 1 and 2.

[0076] FIGS. 8A-8E: Processing of DNA-BC sequencing reads for sort 1. Reads within the same cell barcode that have the same MID sequence were clustered together and were considered as one MID. A consensus peptide-encoding sequence was generated for each cluster. (a) MIDs were filtered to only include those having the peptide-encoding sequence be a length of 25-30. All peptides used were 9-10 AA in length, so the DNA length should be 27 and 30. (b) MIDs were then filtered such that the closest Levenshtein distance of the peptide-encoding sequence to the reference DNA-BC list is no greater than 2. (c) Percent of total reads belonging to each group of MIDs sharing the same read count. MIDs with low read counts (left of the vertical dashed line) were discarded as sequencing error. The resulting MIDs can then be assigned to each sorted T cell according to the cell barcode. (d, e) Total MID counts associated with each cell from the PE⁺ (d) and APC⁺ (e) populations from experiment 1 were compared to their corresponding tetramer staining intensity from index sorting analysis. Each circle denotes one cell. Line indicates linear regression and the associated R-squared value.

[0077] FIGS. 9A-9F: Verification of pMHC classification using the spike-in HCV-KLV(WT) binding clone and primary cells with shared TCRs for experiment 1. (a) Top 10 pMHC specificities of the sorted spike-in HCV-KLV(WT) binding clone, ordered by MID count from high-to-low. Bold border separates detected and non-detected binding peptides by the criteria. (b) In a separate experiment, T cell clone from (a) was stained with the indicated conventional pMHC tetramers in separate tubes in the presence of anti-CD8a (RPA-T8). (c,d) Bolded peptides outside the true binding peptide threshold in (a) were tested for pMHC tetramer staining as in (b). (e) MID count for the top 8 ranked peptides for the tetramer+ primary T cells with shared TCRα and/or TCRβ sequence. Dashed line indicates MID count threshold for identifying positive binding peptides. (f) Top 5 peptides by MID count for T cells sharing at least one TCRα or β chain from (e). Bold border separates positive and non-specific binding peptides (SEQ ID NOs: 1621, 1592, 1618, 1614, 1616, 1711, 1705, 1712 and 1719, respectively, left to right by column, top to bottom by row, respectively first appearance only).

[0078] FIGS. 10A-10D: Analysis of Experiment 2. (a) MID counts greater than 0 from peptides in the Tetramer population (n=8 cells). (b) Peptide rank curve by MID counts for all primary T cells. Dashed lines indicate MID threshold for identifying positively bound peptides. Each solid line indicates a cell and only the top 8 peptides were shown ranked by their MID counts. Blue solid lines indicate cells with at least one positively binding peptide; grey solid lines indicate cells that did not positively bind any peptides based on the criteria discussed at the beginning of the supplementary information. Insert pie chart indicate proportion of cells with the indicated number of positively bound peptides. In the insert, paired indicates detection of 2 antigens; one for a wildtype antigen and one for an altered peptide ligand with one amino acid substitution. This was found for GP100 and NY-ESO-1 (Supplementary Table) (c) V-gene usage of TCR sequences that are specific for YFV_LLW (n=27 for TRAV, n=29 for TRBV) or MART1_A2L (n=37 for TRAV, n=39 for TRBV). Only distinct TCR sequences were used (one clonal population counts for only one TRAV and/or one TRBV). (d) Estimated frequencies of antigen-binding T cell populations in total CD8⁺ T cells with at least 1 detected cell, separated by phenotype. It was found that CMV and EBV-specific T cells accounted for the majority of this donor's non-naïve repertoire, which corroborates the CMV and EBV seropositive status of this individual. In agreement with Experiment 1, it was found that, among peptides surveyed, naïve T cells contained greater diversity of antigen specific T cell populations compared to the non-naïve compartment, which is highly skewed towards a select few antigen specific T cell populations. It was also found the same dominance in TCRα V gene usage among the MART1-A2L and YFV-LLW specific TCRs in this donor compared to Experiment 1.

[0079] FIGS. 11A-11D: Gating scheme and sorting strategy for Experiment 3 and 4. (a) Representative gating and sorting scheme for Experiment 3 and 4. Gating scheme for Experiment 3 is shown. (b) Tetramer gating on the flow-through fraction of Experiment 3 (c) Estimated frequency of the sorted Tetramer⁺ populations for Experiment 3 and 4. (d) Percentage of naive cells of the indicated Tetramer⁺ CD8+ T cell population of total Tetramer⁺ T cells for Experiment 3 and 4. Bulk refers to the flow-through from the same experiment.

[0080] FIGS. 12A-12E: Analysis for Experiment 3. (a) MID counts for each peptide from each cell from the Tetramer population (12 cells, 42 peptides each). (b-d) Peptide rank curve by MID counts for the top 5 peptides for Neo⁺WT⁻ (b), Neo⁻WT⁺ (c), and Neo⁺WT⁺ population (d) for Experiment. Dashed lines indicate MID threshold for identifying positively bound peptides. Each solid line indicates a cell and only the top 5 peptides were shown raked by their MID counts. Blue solid lines indicate cells with at least one positively binding peptide; grey solid lines indicate cells that did not positively bind any peptides based on the criteria discussed at the beginning of the supplementary information. Insert pie charts for all three panels indicate proportion of cells with the indicated number of positively bound peptides. (e) Cell count for all detected peptides for each Neo-WT antigen pair (n=223 cells) (g) Number of Neo⁺WT⁻, Neo⁻WT⁺, and Neo⁺WT⁺ peptides that are targeted by TCRs with successfully recovered TCRαβ sequences.

[0081] FIGS. 13A-13C: Verification of pMHC classification using the spike-in HCV-KLV(WT) binding clone and primary cells with shared TCRs in Experiment 3. (a) Top 5 epitopes by MID count for T cells sharing at least one TCRα or β chain. Bold border indicates the positively-classified binding peptides. TCRα or β chains with the same color in the same cluster have the same nucleotide sequence for the respective chain. (b,c) Peptide rank curve by MID counts for the HCV-KLV(WT) binding spike-in clone (12 cells) (SEQ ID NOs: 1776, 2204, 2199, 2236, 2164, 2261, 2300, 2306, 2505, 2506, 2425, 2445, 2482, 2487 and 2447, respectively, left to right by column, top to bottom by row, first appearance only) (b) and primary cells with shared TCR (13 cells) (c). Dashed lines indicate MID threshold for identifying positively bound peptides. Each solid blue line indicates a cell and only the top 5 peptides were shown raked by their MID counts. For (c) only cells with identical TCRα and TCRβ sequence on an AA level were considered, corresponding to cluster 1a, 2, 5, and 6 in (a). For WT-antigen, the peptide was named after the protein; for Neo-antigen, the peptide was named as protein name_AA #AA.

[0082] FIGS. 14A-14H: DNA-BC analysis for Experiment 4. (a) MID counts associated with peptides from the sorted Tetramer⁻ CD8⁺ T cells (36 cells). MID threshold for positively binding peptide is designated by the dashed line. (b-d) Peptide rank curve by MID counts for the (b) Neo⁺WT⁻, (c) Neo⁻WT⁺ and (d) Neo⁺WT⁺ primary cells. Dashed line indicates MID threshold for identifying positively bound peptides. Each solid line indicates a cell and only the top 5 peptides were shown ranked by their MID counts. Blue solid lines indicate cells with at least one positively binding peptide; grey solid lines indicate cells that did not positively bind any peptides based on the criteria discussed at the beginning of the supplementary information. Insert pie charts for all three panels indicate proportion of cells with the indicated number of positively bound peptides. (e) Cell count for all detected peptides for each Neo-WT gene pair (n=274 cells). (f) Relative proportion of the three cell populations for each Neo-WT gene pair from (e), similar to FIG. 2B. Each antigen was normalized by the relative frequency and number of cells sorted from the corresponding Tetramer⁺ population (see Methods). Only pairs where both the Neo-antigen and Wildtype were detected in at least one cell, and have at least 3 detected cells total were considered (n=200 cells). (g) Comparison of cross-reactivity for Neo-WT antigen-binding T cell populations from (f) that have mutations near the middle or fringes (n=11 Neo-WT antigen pairs, One-tailed Mann-Whitney U Test). (h) Comparison of the percent cross-reactive T cells that exist within each Neo-WT antigen-binding T cell population between Experiment 3 and 4. Only Neo-WT pairs that meet the criteria in (f) and are shared between the two experiments are considered. Dot represents one Neo-WT pair and lines connect the same pair from the two experiments (n=18, One-tailed Wilcoxon Signed-Rank Test).

[0083] FIGS. 15A-15E: Validation for “undetected” peptides in Experiment 3 and 4. (a) ELISA for all 40 pMHC monomers UV-exchanged with IVTT-generated Neo or WT peptides. UV-exchanged pMHC monomers are plated at a concentration of 1.6 nM estimated based on the un-exchanged MHC monomer concentration, followed by anti-β2M staining. Blue dots represent un-exchanged MHC monomer diluted at various concentration from lowest to highest (0.05, 0.25, 1.25, 6.25, 31.25 nM). Red dot represents UV-exchanged pMHC in IVTT solution that did not contain a peptide-encoding DNA template. Black dots indicate the 5 “undetected” peptides in Experiment 3 and 4. Solid line is a sigmoidal model fit to the standards. Arrows indicate “undetected” peptides from Experiment 3 and 4. (b) TetTCR-Seq experiment on an additional donor's PBMC sample using an IVTT-generated pMHC tetramer library for PPI_ALWM and the five “undetected” peptides. Shown is the estimated frequency of each antigen-binding CD8+ T cell population. (c-e) Peptide titration experiments were performed for three of the “undetected” peptides where T cell clones could be generated using Tetramer⁺ T cells from (b). Peptides generated from either IVTT or the traditional, synthetic peptide method, were diluted at different ratios and were used to form PE labeled pMHC tetramers. Starting concentration of synthetic peptide is 100 μM for all peptides. These pMHC tetramers were used to stain a cognate T cell clone. Anti-CD8a (RPA-T8) was present throughout the staining. MFI, Median Fluorescence Intensity. a.u., arbitrary unit. For WT-antigen, the peptide was named after the protein; for neo-antigen, the peptide was named as protein name_AA #AA.

[0084] FIGS. 16A-16D: Gating scheme and sorting strategy for Experiment 5 and 6. (a) Representative gating scheme for Experiment 5 and 6. Shown is the gating scheme for Experiment 5. (b) Tetramer gating on the flow-through fraction from Experiment 5. (c) Estimated frequencies of the three Tetramer⁺ populations for Experiment 5. Frequencies could not be obtained for Experiment 6. (d) Naïve T cell percentages for each of the three Tetramer⁺ populations and bulk flow-through CD8+ T cells for Experiment 5 and 6.

[0085] FIGS. 17A-17K: Analysis of Experiment 5 and 6. (a-h) MID counts associated with peptides from the sorted Tetramer⁻ CD8⁺ T cells for Experiment 5 (a) and 6 (e). Peptide rank curve by MID counts for the indicated Tetramer⁺ cell populations for Experiment 5 (b-d) and 6 (f-h). Dashed line indicates MID threshold for identifying positively bound peptides. Each solid line indicates a cell and only the top 8 peptides were shown ranked by their MID counts. Blue solid lines indicate cells with at least one positively binding peptide; grey solid lines indicate cells that did not positively bind any peptides based on the criteria discussed at the beginning of the Supplementary Information. Insert pie charts for all these panels indicate proportion of cells with the indicated number of positively bound peptides. For insert pie charts, 2+ Paired indicates that all detected peptides from a given cell belong to a particular Neo/WT antigen pair; this has the same meaning as “2” in pie chart inserts of Experiment 3 and 4, but since one WT was included that had two neo-antigens in this library (DHX33-LLA) it was found one cell that was cross reactive to all three peptides, which is counted in this category as well. 2+ unpaired indicates at least 2 detected peptides but at least one peptide did not belong to a particular Neo/WT antigen pair. (i) Total cell counts for Neo-WT antigen pairs with at least one detected cell (n=678 cells). (j) As in FIG. 2f, a greater difference in the percent of cross-reactive antigen-binding populations is observed when revising the peptide middle position to position 3-7. Each circle represents the percent of cross-reactive T cells observed for one Neo-WT antigen pair. Only antigen pairs where both the Neo and WT peptides were detected in at least one cell, with at least 3 cells total are included. Bars denote median. (n=62 Neo-WT antigen pairs, One-tailed Mann-Whitney U Test). (k) Definition of PAM1 high/low threshold. PAM1 values for amino acid pairs i and j are calculated by adding the one directional PAM1 values, PAM1ᵢⱼ+PAM1ⱼᵢ, as defined by Wilbur et al. Shown is a histogram of all the possible PAM1 values between non-identical amino acids (n=190 AA transitions). The top 10% is designated as PAM1 High.

[0086] FIG. 18: ELISA on the 315 pMHC monomer library UV-exchanged with IVTT-generated peptides for Experiment 5 and 6. UV-exchanged pMHC monomer using IVTT-generated peptides are plated on ELISA plates at a concentration of 1.6 nM estimated from unexchanged MHC monomer concentration and then stained with anti-β2m antibody. Blue circles represent pMHC concentration standards. Solid line represents sigmoidal model fit to the standards. Red dot represents UV-exchanged pMHC in IVTT solution that did not contain a peptide-encoding DNA template, thus serves as a negative control. Black dots represent peptides that were not detected in Experiments 5 or 6. Green diamonds represents peptides that were detected in at least one cell in Experiment 5 or 6. Top histogram combines both the detected and undetected peptides in respect to pMHC monomer concentration plotted below. Dashed line represents the minimum threshold for pMHC UV-exchange. The blue dot standard to the right side of the dashed line is 0.4 nM of un-exchanged MHC monomer.

[0087] FIG. 19: Both PE and APC fluorescent DNA-BC pMHC tetramers can be used to sort neo-antigen-specific T cells with no functional reactivity to WT counterpart peptide. A DNA-BC pMHC library was constructed as in Experiment 3 and 4 to sort APC⁺PE⁻ (Neo⁺WT⁻) primary T cells. A fluorescence swapped pMHC library compared to Experiment 3 and 4, where neo-antigen pMHCs were on the PE channel and WT pMHCs were on the APC channel, was used to sort PE⁺APC⁻ (Neo⁺WT⁻) primary T cells. 5 cells were sorted per well for in vitro culture. LDH cytotoxicity assay on in vitro expanded primary T cells sorted interacting with T2 cells pulsed with the 20 neo-antigen peptide pool or 20 WT counterpart peptide pool. Each pair of black/grey bars represent one T cell line. Each condition was performed in triplicates. Standard deviation is shown for each condition.

[0088] FIGS. 20A-20C: Characterization of the Neo⁺WT⁻ and Neo⁺WT⁺ cell lines in FIG. 2G. (a,b) T cell clonal composition as assessed by single cell TCR sequencing and matched pMHC specificity for the T cell lines in the Neo⁺WT⁻ (a) and Neo⁺WT⁺ (b) of FIG. 2g. For (a), TetTCR-Seq was performed for pooled cell lines and the resulting single sorted cells were matched to the correct T cell line from bulk TCR sequencing results of each T cell line (SEQ ID NOs: 4406-4425, respectively, left to right by column, top to bottom by row). For (b), TetTCR-Seq was performed on each T cell line using the 40 Neo-WT DNA-BC pMHC tetramer library. Single cell DNA-BC and TCR sequences were used to tally the T cell clonality and the antigen binding of each T clone within a T cell line. For WT-antigen, the peptide was named after the protein; for neo-antigen, the peptide was named as protein name_AA #AA (SEQ ID NOs: 4406-4425, respectively, left to right by column, top to bottom by row). (c) LDH cytotoxicity assay on the monoclonal T cell Neo⁺WT⁺ lines, discovered from (b), using the pMHC identified by TetTCR-Seq. Each condition performed in triplicates. “Neo pool-1” and “WT Pool-1” refers to the other 19 Neo-antigens and Wildtype peptides, respectively, that were not identified by TetTCR-Seq for the given cell line. HCV-KLV peptide was used as a known-antigen negative control.

[0089] FIGS. 21A-21B: Tetramer staining of additional Jurkat 76 cell lines transduced with TCRs identified from Experiment 3. Jurkat 76 cells were transduced with the indicated TCRs, derived from primary T cell with positively identified antigens from Experiment 3, and then stained with the indicated pMHC tetramers. (a) A pair of TCRs that were identified to be cross reactive for both the Neo-antigen and Wildtype versions of SEC24A or just the Wildtype from TetTCR-Seq. (b) a TCR identified to be cross reactive for the Neo-antigen and Wildtype versions of NSDHL from TetTCR-Seq. Fl, fluorescence Intensity. a.u., arbitrary unit. For WT-antigen, the peptide was named after the protein; for Neo-antigen, the peptide was named as protein name_AA #AA.

[0090] FIGS. 22A-22D: 3′ end sequencing for highly multiplexed single cell RNA-seq (3′end scRNA-seq) is robust and reproducible. (a) Illustration of workflow of 3′end scRNA-seq. (b) Comparison of ERCC detection efficiency between 3′end scRNA-seq and published scRNA-seq data using Fluidigm C1. (c) 3′end scRNA-seq is robust in gene expression quantification compared to original Smart-seq2. (d) 3′end scRNA-seq has very low cross-contamination rate.

[0091] FIGS. 23A-23B: Schematics of TetTCR-SeqHD. (a) Workflow of generating DNA-labeled tetramer for TetTCR-SeqHD. (b) Workflow of application of TetTCR-SeqHD to study gene expression, phenotype, and TCR repertoire of antigen specific T cells

[0092] FIGS. 24A-24D: TetTCR-SeqHD of CD8+ T cell clones. (a) The different antigen specific T cell clones used and the types of TCRβ among these polyclonal populations. (b) The distribution of TCRβ species within each polyclonal population. (c) Sequencing metrics of TetTCR-SeqHD on T cell clones. (d) Density plot of MID counts (log 10) of self and foreign peptides.

[0093] FIGS. 25A-25C: Data quality metrics for T cell clones. (a) Histogram of predicted antigen specificity using pMHC DNA barcodes. Within each predicted antigen specificity, the stacked bar denotes distribution of the true antigen specificity based on TCRβ sequence. (b) The recall and precision rate of antigen specificity identification using pMHC DNA barcodes. (c) Table showing the recall, precision and false discovery rate of antigen specificity identification using pMHC DNA barcodes for each clone.

[0094] FIG. 26: Circos plot showing the distribution of TCRβ species within each predicted antigen specificity using pMHC DNA barcodes.

[0095] FIGS. 27A-27F: TetTCR-SeqHD of enriched CD8+ T cells from frozen healthy blood donors' PBMCs. (a) Density plot of MID counts (log 10) of self and foreign peptides. (b) Histogram of MID counts (log 10) of self and foreign peptides. Dashed line is the negative threshold to call positive tetramer binding events. (c) tSNE analysis of single cell gene expression. Red dots are foreign-antigen specific cells and blue dots are self-antigen specific cells. The antigen specificities were predicted by pMHC DNA barcodes. (d) PCA analysis of antigen specific gene expression characters. (e) Heatmap showing the predicted antigen specificities for the top 10 abundant TCRs with unique TCRα and TCRβ. (f) Table showing the percentage of foreign antigen, self-antigen and negatives in each donor, as well as the ratio between number of foreign and self-antigen specific cells predicted using pMHC DNA barcodes in comparison with flow cytometry. Donor849_negative is the sorted tetramer negative population.

[0096] FIG. 28: AbSeq of antigen specific CD8⁺ T cells. Left: tSNE and phenograph clustering analysis using gene expression and antibody expression. Right: Antibody expression of CD45RA, CD45RO, CD197 and CD95.

### DESCRIPTION OF ILLUSTRATIVE EMBODIMENTS

[0097] It has been a challenge to link peptides with the individual TCR sequences that they bind, compounded when analyzing a large number of peptides in hundreds of single T cells simultaneously. The addition of molecular identifiers to TCR sequencing can improve the accuracy of TCR sequencing. Further, by probing a large number of T cells with MHCs that have been modified to house specific peptides, TCR sequences can be associated with the antigens that they bind. Accordingly, in certain embodiments, the present disclosure provides methods to use molecular identifiers to increase sequencing accuracy and peptide MHC tetramers to stain T cells, in order to link TCR sequences to their antigen.

[0098] In some embodiments, the present disclosure provides compositions and methods to generate DNA barcode labeled pMHC or peptide antigen multimer libraries for hundreds or thousands of peptides, and methods of using the pMHC or peptide antigen multimer libraries to determine the following linked information at single cell level for individual T or B cells: sequences of T or B cell receptors, antigen specificity, T or B cell transcriptomic or gene expression level, and proteogenomics by the expression level of protein markers inside or on the surface of T or B cells at single cell level for individual T or B cells. This linked information is then used to assess T or B cell developmental, activation status, clonal expansion status, phenotype, antigen specificity, and funcation in different physiological or pathological conditions, such as infection, vaccination, allergy, autoimmune diseases, cancer, aging, and neurodegenerative diseases. TCR or BCR sequences and antigen sequences can be used as therapeutics in difference diseases or vaccine. The status of T or B cell developmental, activation status, clonal expansion status, phenotype, antigen specificity, and funcation can be used for immune profiling, disease early diagnosis, therapeutics development, prognosis, treatment progress monitoring, and treatment responder or non-responder separation.

[0099] In some embodiments, the present methods comprise the labelling of oligonucleotides barcoding antigen specificities by first covalently linking a universal DNA linker oligonucleotides or DNA handle to multimer backbone, such as dimerization antibodies or streptavidin. Then, the DNA barcode that either directly encodes the codons for amino acids in the antigen peptide or a string of random oligonucleotides that is designated to represent the identity of a particular peptide is annealed to the universal DNA linker oligonucleotides or DNA handle. This process can eliminate the need to individually covalently link DNA barcode to multimer backbone. This process can be performed in parallel for hundreds or thousands of DNA barcodes. This process can ensures that all of the DNA barcodes use the same batch of multimer backbone with the same DNA handle to multimer ratio. This process can also eliminate the DNA:multimer ratio differences if individual DNA barcodes are to be covalently linked to multimer backbone. This approach made it feasible to screen hundreds or thousands of DNA-labeled antigens at once without introducing bias to the barcode labeling ratio. This way, the true differences on antigen binding can be examined by comparing the DNA barcode aboundance without to worry about if DNA-barcode:multimer ratio introduced by individually labelling DNA barcode to multimer would causing the aboundance difference among different antigens or antigen-specific T cell number difference. This approach can also make it possible to use DNA-barcode number to separate true T cell binding antigens from background noise. This approach can also make it fast and easy to tailor a large set of different peptide antigens for different diseases or different individual patients where antigens are different. This approach can also enable the simultaneous high throughput manner, which can be easily applied in patient samples for screening thousands or tens of thousands of peptides.

[0100] In certain embodiments, the present methods allow for the quick generation of peptides using in vitro transcription and translation. This can allow one to synthesize peptide encoding oligonucleotides, which has a much faster turnaround time and a much lower cost compared to synthesizing peptides. This approach can allow make it fast and easy to tailor a large set of different peptide antigens for different diseases or different individual patients where antigens are different. This approach can also enable the simultaneous high throughput manner, which can be applied in patient samples for screening thousands or tens of thousands of peptides.

[0101] In some aspects, the methods described herein comprise the simultaneous profiling of gene expression or transcriptome, proteogenomics and TCR or BCR sequences for each single cell. This can allows for the assessment of T or B cell developmental, activation status, clonal expansion status, phenotype, antigen specificity, and funcation in different physiological or pathological conditions, such as infection, vaccination, allergy, autoimmune diseases, cancer, aging, and neurodegenerative diseases. TCR or BCR sequences and antigen sequences which can be used as therapeutics in difference diseases or vaccine. The status of T or B cell developmental, activation status, clonal expansion status, phenotype, antigen specificity, and funcation can be used for immune profiling, disease early diagnosis, therapeutics development, prognosis, treatment progress monitoring, and treatment responder or non-responder separation.

[0102] In certain aspects, the methods described herein can be used for scalable analysis for different amounts of cells as well as cells with different frequency in existence, such as antigen-specific CD8+ T cells existed at a frequency of 1 in a million CD8+ T cells or 1 in 100 CD8+ T cells. For rare antigen specific T or B cells or primary antigen specific T or B cells, plate-based single cell sequencing methods can be used while high throughput single cell gene expression analysis platforms can be used for thousands or tens of thousands of antigen specific T or B cells.

[0103] In some embodiments, the present disclosure provides methods for generating peptide MHC (pMHC) multimers for T cell isolation. First, an antigen is prepared by performing in vitro transcription/translation on a barcoded peptide-encoding oligonucleotide. The nascent peptide is then loaded into a MHC monomers, generating a pMHC. Loading may be performed by peptide exchange, such as UV-mediated peptide exchange, temperature-based peptide exchange or other methods. Several pMHC monomers with identical known peptides are then linked to a polymer conjugate which is also linked to an oligonucleotide encoding the peptide now associated with the MHC monomer, as well as a barcode. The polymer conjugate may be a dextran or a polypeptide. The pMHC multimers may further comprise a fluorophore or other detectable moiety which may aid in detection and sorting. The fluorophore may be phycoerythrin (PE), allophycocyani (APE), PE-Cy5, PE-Cy7, APC, APC-Cy7, QDOT® 565, QDOT® 605, QDOT® 655, QDOT® 705, BRILLIANT® VIOLET (BV) 421, BV 605, BV 510, BV 711, BV786, PERCP, PERCP/CY5.5, ALEXAFLUOR® 488, ALEXAFLUOR® 647, FITC, BV570, BV650, DYLIGNT® 488, DYLIGHT® 649, OR PE/DAZZLE® 594. The pMHC multimers generated as above may then be used to interrogate any antigen binding cells, such as T cells. T cells can bind the peptides of the pMHC multimers and thus these pMHC multimers can be used to isolate or stain T cells, such as by FACS. By maintaining the association of the pMHC multimers with the T cells, they may be sequenced together, thereby linking the TCR sequence with its antigen. The library preparation and sequencing can be done in a highly multiplexed fashion by preparing sequencing libraries from pMHC bound T cells which have been FACS sorted into individual wells simultaneously, and subsequently pooled for sequencing. The barcodes included in the pMHC multimers cam increase sequencing accuracy and allow for background reduction. This method accurately pairs T cell receptors with their antigens in a highly multiplexed and cost effective manner. The sequencing of the TCRs is referred to herein as Tetramer associated TCR Sequencing (TetTCR-Seq). Binding may be determined using a library of DNA-barcoded antigen-tetramers that are rapidly and inexpensively generated using an in vitro transcription/translation platform. TetTCR-Seq is effective for rapidly isolating TCR sequences that are only neoantigen-specific with no cross-reactivity to corresponding wildtype-antigens. Thus, in another method, there is provided a method for identifying neoantigen-specific T cell receptors. pMHC multimers comprising neoantigen or wild type peptides are generated using the methods presented herein, and used to stain a plurality of T cells. These pMHC multimers may be labelled so as to distinguish neoantigen presenting pMHC multimers from wild type during sorting. For example, these multimers may be labelled using different fluorophores. These pMHC bound T cells are then sorted and sequenced. T cells which only bind the neoantigen peptides can then be sequenced to identify neoantigen-specific TCRs. This method may be used over the course of immune therapy, so as to monitor the response to therapy. The neoantigen specific T cells may then be used to prepare populations of the specific neoantigen specific T cells. These populations of T cells may then be used to treat a subject, for example, a subject having cancer.

[0104] In another method, there is provided a method for identifying antigen cross-reactivity in naïve T cells. Antigen cross-reactivity can have severe consequences, so it is important for therapeutic purposes that the antigen binding repertoire of T cells is known. To begin, a plurality of pMHC multimers which present either neoantigens or wild type antigens may be used to stain naïve T cells, and sorted. The TCR sequences, and associated neoantigen sequences may then determined by sequencing. This data can then be used to help determine the course of treatment for an individual, whether by T cell therapy, or neoantigen based therapy.

[0105] In some embodiments, there are provided methods for examining antigen-specific T cell frequency using TetTCR-seq to detect a disease or disorder. The TetTCR-seq may be applied to a sample, such as blood or other biological sample, obtained from a subject, particularly a human. The TetTCR-seq may be used to detect infection (e.g., CMV, EBV, HBV, HCV, HPV, and influenza), vaccination, and/or disease history of a subject. For example, the T cell frequency of a viral antigen or cancer antigen may be determined as shown in FIG. 1.

[0106] In another method, there is provided a method for 3′ end sequencing of RNA from a plurality of single cells. 3′ end sequencing is a method for gene expression profiling, but present methods have limited accuracy and biased sequencing depth among all cells analyzed. The method provided herein is based on the Smart-seq2 method (Picelli et al., 2013), though incorporates cellular barcodes in the reverse transcription primer to increase throughput and accuracy, and a restriction site in the template switch oligonucleotide. The reverse transcription primers comprising cellular barcodes are added to individual wells prior to cells, thereby discriminating individual cells at the library preparation stage. Cleavage of the restriction site prior to library preparation, followed by custom library preparation using the cleaved site, greatly increases 3′ end enrichment. These libraries can then be pooled and sequenced, and the gene expression can be profiled from a multitude of cells with high accuracy. Single cell 3′ end RNA-seq library can be re-pooled to adjust sequencing depth for each individual cell, thus achieving even read depth distribution among all cells analyzed. This method may be further used to analyze any cell type. Of particular interest is the gene expression of T cells, such as those isolated by the methods described herein.

[0107] In further embodiments, there are provided methods for combining the TetTCR-seq to obtain antigen specificity and TCR sequences with the T cell activation and developmental status by 3′ end single cell RNA-sequencing. The combination may be used to obtain an integrated T cell profile. The integrated T cell profile may be used to determine the presence of a disease or disorder, such as an infection, vaccination response, or cancer immunotherapy response.

[0108] Thus, the current method of TetTCR-seq may be used to obtain the T Cell Receptor (TCR) sequence and the peptide sequence of the peptide Major Histocompatibility Complex (pMHC) that the TCR binds. In addition, TetTCR-seq may be used to identify TCR cross-reactivity in a high-throughput manner. The method may be used for identifying non-crossreactive TCR sequences that react with cancer neoantigen epitopes, but not with the wildtype endogeneous epitope. Using a TCR transgenic cell lines or T cell clones generated from primary T cells, this method can also be used to identify a large peptide library to find out all possible cross-reactive peptide that a T cell may have. The read out may be sorting single T cells in either 96 well plates or 384 well plate and using multiplex PCR. A variation of this method can also be used to screen of MHC binding from pool of in vitro transcription/translation generated peptides. In addition, TetTCR-seq can be made high throughput by single cell droplet sequencing to interrogate even large number of T cells.

[0109] Further, the TetTCR-seq may be used to select the best peptide or peptide combinations and/or TCR and TCR combinations, immune monitoring on infection, vaccination, auto-immune diseases, and/or cancer. These methods may further comprise patient evaluation on which therapy to use for infection, to identify the vaccination, for tracking therapy efficacy, infection, or vaccination efficacy, and/or for post-trial analysis of patient stratification, such as responder and non-responders T cell signatures. These may be performed based on TCR clonality and antigen specificity. The 3′end scRNA-seq may be further used to reveal T cell activation and developmental status. Thus, the TetTCR-seq may be combined with in tube 3′end scRNA-seq, BD Rhapsody or 10× genomic's CHROMIUM systems, which may be high throughput.

[0110] The methods provided herein may be used to detect self-antigen specific T cells, wherein the self-antigen specific T cells cause severe adverse effect after immune checkpoint blockade therapy and other cancer immunotherapy, before a subject is administered a therapy. Also provided herein is a method of detecting T cell binding epitopes and further developing the T cell binding epitopes into vaccines or TCR redirected adoptive T cell therapy for any pathogens. Further, some embodiments provide a method of using common pathogen and auto-immune disease associated epitopes identified according to the present methods to test and monitor the immune health of individuals and predict individual's protective capacity to infection or likelihood of developing auto-immune diseases and monitoring the early on-set of auto-immune diseases. In addition, there is provided a method of detecting regulatory T cell binding epitopes according to the present methods and developing vaccines to eliminate or enhance regulator T cell function or number for immunological diseases.

### I. Definitions

[0111] “Treatment” and “treating” refer to administration or application of a therapeutic agent to a subject or performance of a procedure or modality on a subject for the purpose of obtaining a therapeutic benefit of a disease or health-related condition. For example, a treatment may include administration of a T cell therapy comprising T cells bearing high affinity TCR(s) or a mixture of neo-antigen peptides as a vaccine or immune checkpoint blockade.

[0112] “Subject” and “patient” refer to either a human or non-human, such as primates, mammals, and vertebrates. In particular embodiments, the subject is a human.

[0113] The term “antibody” herein is used in the broadest sense and specifically covers monoclonal antibodies (including full length monoclonal antibodies), polyclonal antibodies, multispecific antibodies (e.g., bispecific antibodies), and antibody fragments so long as they exhibit the desired biological activity.

[0114] The term “monoclonal antibody” as used herein refers to an antibody obtained from a population of substantially homogeneous antibodies, e.g., the individual antibodies comprising the population are identical except for possible mutations, e.g., naturally occurring mutations, that may be present in minor amounts. Thus, the modifier “monoclonal” indicates the character of the antibody as not being a mixture of discrete antibodies. In certain embodiments, such a monoclonal antibody typically includes an antibody comprising a polypeptide sequence that binds a target, wherein the target-binding polypeptide sequence was obtained by a process that includes the selection of a single target binding polypeptide sequence from a plurality of polypeptide sequences. For example, the selection process can be the selection of a unique clone from a plurality of clones, such as a pool of hybridoma clones, phage clones, or recombinant DNA clones. It should be understood that a selected target binding sequence can be further altered, for example, to improve affinity for the target, to humanize the target binding sequence, to improve its production in cell culture, to reduce its immunogenicity in vivo, to create a multispecific antibody, etc. and that an antibody comprising the altered target binding sequence is also a monoclonal antibody of this invention. In contrast to polyclonal antibody preparations, which typically include different antibodies directed against different determinants (epitopes), each monoclonal antibody of a monoclonal antibody preparation is directed against a single determinant on an antigen. In addition to their specificity, monoclonal antibody preparations are advantageous in that they are typically uncontaminated by other immunoglobulins.

[0115] The phrases “pharmaceutical or pharmacologically acceptable” refers to molecular entities and compositions that do not produce an adverse, allergic, or other untoward reaction when administered to an animal, such as a human, as appropriate. The preparation of a pharmaceutical composition comprising an antibody or additional active ingredient will be known to those of skill in the art in light of the present disclosure. Moreover, for animal (e.g., human) administration, it will be understood that preparations should meet sterility, pyrogenicity, general safety, and purity standards as required by FDA Office of Biological Standards.

[0116] As used herein, “pharmaceutically acceptable carrier” includes any and all aqueous solvents (e.g., water, alcoholic/aqueous solutions, saline solutions, parenteral vehicles, such as sodium chloride, Ringer's dextrose, etc.), non-aqueous solvents (e.g., propylene glycol, polyethylene glycol, vegetable oil, and injectable organic esters, such as ethyloleate), dispersion media, coatings, surfactants, antioxidants, preservatives (e.g., antibacterial or antifungal agents, anti-oxidants, chelating agents, and inert gases), isotonic agents, absorption delaying agents, salts, drugs, drug stabilizers, gels, binders, excipients, disintegration agents, lubricants, sweetening agents, flavoring agents, dyes, fluid and nutrient replenishers, such like materials and combinations thereof, as would be known to one of ordinary skill in the art. The pH and exact concentration of the various components in a pharmaceutical composition are adjusted according to well-known parameters.

[0117] “T cell” as used herein denotes a lymphocyte that is maintained in the thymus and has either α:β or γ:δ heterodimeric receptor. There are Va, νβ, Vy and V8, Ja, Iβ, Jy and J5, and \ddot{υ}β and 'Oδ loci. Naive T cells have not encountered specific antigens and T cells are naive when leaving the thymus. Naive T cells are identified as CD45RO″, CD45RA⁺, and CD62L⁺. Memory T cells mediate immunological memory to respond rapidly on re-exposure to the antigen that originally induced their expansion and can be “CD8⁺” (T cytotoxic cells) or “CD4⁺” (T helper cells). Memory CD4 T cells are identified as CD4⁺, CD45RO⁺ cells and memory CD8 cells are identified as CD8⁺ CD45RO⁺. In some aspects, “precursor T cells” refers to cells found in individuals without an immune response to antigen targets. The antigen targets may be HIV-specific T cells in healthy HIV negative blood donors or pre-proinsulin-specific T cells in healthy blood donors who are not diabetic.

[0118] “T cell receptor” (TCR) refers to a molecule found on the surface of T cells (or T lymphocytes) that, in association with CD3, is generally responsible for recognizing antigens bound to major histocompatibility complex (MHC) molecules. The TCR has a disulfide-linked heterodimer of the highly variable α and β chains (also known as TCRα and TCRβ, respectively) in most T cells. In a small subset of T cells, the TCR is made up of a heterodimer of variable γ and δ chains (also known as TCRγ and TCRδ, respectively). Each chain of the TCR is a member of the immunoglobulin superfamily and possesses one N-terminal immunoglobulin variable domain, one immunoglobulin constant domain, a transmembrane region, and a short cytoplasmic tail at the C-terminal end (see Janeway et al., 1997). TCR as used in the present disclosure may be from various animal species, including human, mouse, rat, or other mammals. A TCR may be cell-bound or in soluble form.

[0119] TCRs of this disclosure can be “immunospecific” or capable of binding to a desired degree, including “specifically or selectively binding” a target while not significantly binding other components present in a test sample.

[0120] “Major histocompatibility complex molecules” (MHC molecules) refer to glycoproteins that deliver peptide antigens to a cell surface. MHC class I molecules are heterodimers consisting of a membrane spanning a chain and a non-covalently associated β2 microglobulin. MHC class II molecules are composed of two transmembrane glycoproteins, a and J, both of which span the membrane. Each chain has two domains. MHC class I molecules deliver peptides originating in the cytosol to the cell surface, where the peptide:MHC complex is recognized by CD8+ T cells. MHC class II molecules deliver peptides originating in the vesicular system to the cell surface, where they are recognized by CD4+ T cells. An MHC molecule may be from various animal species, including human, mouse, rat, or other mammals.

[0121] “Peptide antigen” refers to an amino acid sequence, ranging from about 7 amino acids to about 25 amino acids in length that is specifically recognized by a TCR, or binding domains thereof, as an antigen, and which may be derived from or based on a fragment of a longer target biological molecule (e.g., polypeptide, protein) or derivative thereof. An antigen may be expressed on a cell surface, within a cell, or as an integral membrane protein. An antigen may be a host-derived (e.g., tumor antigen, autoimmune antigen) or have an exogenous origin (e.g., bacterial, viral).

[0122] “MHC-peptide tetramer staining” refers to an assay used to detect antigen-specific T cells, which features a tetramer of MHC molecules, each comprising an identical peptide having an amino acid sequence that is cognate (e.g., identical or related to) at least one antigen, wherein the complex is capable of binding T cells specific for the cognate antigen. Each of the MHC molecules may be tagged with a biotin molecule. Biotinylated MHC/peptides are tetramerized by the addition of streptavidin, which is typically fluorescently labeled. The tetramer may be detected by flow cytometry via the fluorescent label. The fluorescent label, or fluorophore, may be phycoerythrin (PE), allophycocyani (APE), PE-Cy5, PE-Cy7, APC, APC-Cy7, Qdot® 565, Qdot® 605, Qdot® 655, Qdot® 705, Brilliant® Violet (BV) 421, BV 605, BV 510, BV 711, BV786, PerCP, PerCP/Cy5.5, AlexaFluor® 488, AlexaFluor® 647, FITC, BV570, BV650, DyLignt® 488, Dylight® 649, PE/Dazzle® 594.

[0123] “Nucleotide,” as used herein, is a term of art that refers to a base-sugar-phosphate combination. Nucleotides are the monomeric units of nucleic acid polymers, i.e., of DNA and RNA. The term includes ribonucleotide triphosphates, such as rATP, rCTP, rGTP, or rUTP, and deoxyribonucleotide triphosphates, such as dATP, dCTP, dUTP, dGTP, or dTTP.

[0124] A “nucleoside” is a base-sugar combination, i.e., a nucleotide lacking a phosphate. It is recognized in the art that there is a certain inter-changeability in usage of the terms nucleoside and nucleotide. For example, the nucleotide deoxyuridine triphosphate, dUTP, is a deoxyribonucleoside triphosphate. After incorporation into DNA, it serves as a DNA monomer, formally being deoxyuridylate, i.e., dUMP or deoxyuridine monophosphate. One may say that one incorporates dUTP into DNA even though there is no dUTP moiety in the resultant DNA. Similarly, one may say that one incorporates deoxyuridine into DNA even though that is only a part of the substrate molecule.

[0125] The term “nucleic acid” or “polynucleotide” will generally refer to at least one molecule or strand of DNA, RNA, DNA-RNA chimera or a derivative or analog thereof, comprising at least one nucleobase, such as, for example, a naturally occurring purine or pyrimidine base found in DNA (e.g. adenine “A,” guanine “G,” thymine “T” and cytosine “C”) or RNA (e.g. A, G, uracil “U” and C). The term “nucleic acid” encompasses the terms “oligonucleotide” and “polynucleotide.” The term “oligonucleotide” refers to at least one molecule of between about 3 and about 100 nucleobases in length. The term “polynucleotide” refers to at least one molecule of greater than about 100 nucleobases in length. These definitions generally refer to at least one single-stranded molecule, but in specific embodiments will also encompass at least one additional strand that is partially, substantially, or fully complementary to at least one single-stranded molecule. Thus, a nucleic acid may encompass at least one double-stranded molecule or at least one triple-stranded molecule that comprises one or more complementary strand(s) or “complement(s)” of a particular sequence comprising a strand of the molecule. As used herein, a single stranded nucleic acid may be denoted by the prefix “ss”, a double-stranded nucleic acid by the prefix “ds”, and a triple stranded nucleic acid by the prefix “ts.”

[0126] A “nucleic acid molecule” or “nucleic acid target molecule” refers to any single-stranded or double-stranded nucleic acid molecule including standard canonical bases, hypermodified bases, non-natural bases, or any combination of the bases thereof. For example, and without limitation, the nucleic acid molecule contains the four canonical DNA bases—adenine, cytosine, guanine, and thymine, and/or the four canonical RNA bases—adenine, cytosine, guanine, and uracil. Uracil can be substituted for thymine when the nucleoside contains a 2′-deoxyribose group. The nucleic acid molecule can be transformed from RNA into DNA and from DNA into RNA. For example, and without limitation, mRNA can be created into complementary DNA (cDNA) using reverse transcriptase and DNA can be created into RNA using RNA polymerase. A nucleic acid molecule can be of biological or synthetic origin. Examples of nucleic acid molecules include genomic DNA, cDNA, RNA, a DNA/RNA hybrid, amplified DNA, a pre-existing nucleic acid library, etc. A nucleic acid may be obtained from a human sample, such as blood, cells in leukapheresis chamber, serum, plasma, cerebrospinal fluid, cheek scrapings, biopsy, semen, urine, feces, saliva, sweat, etc. A nucleic acid molecule may be subjected to various treatments, such as repair treatments and fragmenting treatments. Fragmenting treatments include mechanical, sonic, and hydrodynamic shearing. Repair treatments include nick repair via extension and/or ligation, polishing to create blunt ends, removal of damaged bases, such as deaminated, derivatized, abasic, or crosslinked nucleotides, etc. A nucleic acid molecule of interest may also be subjected to chemical modification (e.g., bisulfite conversion, methylation/demethylation), extension, amplification (e.g., PCR, isothermal, etc.), etc.

[0127] “Analogous” forms of purines and pyrimidines are well known in the art, and include, but are not limited to aziridinylcytosine, 4-acetylcytosine, 5-fluorouracil, 5-bromouracil, 5-carboxymethylaminomethyl-2-thiouracil, 5-carboxymethylaminomethyluracil, inosine, N6-isopentenyladenine, 1-methyladenine, 1-methylpseudouracil, 1-methylguanine, 1-methylinosine, 2,2-dimethylguanine, 2-methyladenine, 2-methylguanine, 3-methylcytosine, 5-methylcytosine, N.sup.6-methyladenine, 7-methylguanine, 5-methylaminomethyluracil, 5-methoxyaminomethyl-2-thiouracil, beta-D-mannosylqueosine, 5-methoxyuracil, 2-methylthio-N6-isopentenyladenine, uracil-5-oxyacetic acid methylester, pseudouracil, queosine, 2-thiocytosine, 5-methyl-2-thiouracil, 2-thiouracil, 4-thiouracil, 5-methyluracil, uracil-5-oxyacetic acid, and 2,6-diaminopurine. The nucleic acid molecule can also contain one or more hypermodified bases, for example and without limitation, 5-hydroxymethyluracil, 5-hydroxyuracil, a-putrescinylthymine, 5-hydroxymethylcytosine, 5-hydroxycytosine, 5-methylcytosine, ˜-methyl cytosine, 2-aminoadenine, acarbamoylmethyladenine, N′-methyladenine, inosine, xanthine, hypoxanthine, 2,6-diaminpurine, and N₇-methylguanine. The nucleic acid molecule can also contain one or more non-natural bases, for example and without limitation, 7-deaza-7-hydroxymethyladenine, 7-deaza-7-hydroxymethylguanine, isocytosine (isoC), 5-methylisocytosine, and isoguanine (isoG). The nucleic acid molecule containing only canonical, hypermodified, non-natural bases, or any combinations the bases thereof, can also contain, for example and without limitation where each linkage between nucleotide residues can consist of a standard phosphodiester linkage, and in addition, may contain one or more modified linkages, for example and without limitation, substitution of the non-bridging oxygen atom with a nitrogen atom (i.e., a phosphoramidate linkage, a sulfur atom (i.e., a phosphorothioate linkage), or an alkyl or aryl group (i.e., alkyl or aryl phosphonates), substitution of the bridging oxygen atom with a sulfur atom (i.e., phosphorothiolate), substitution of the phosphodiester bond with a peptide bond (i.e., peptide nucleic acid or PNA), or formation of one or more additional covalent bonds (i.e., locked nucleic acid or LNA), which has an additional bond between the 2′-oxygen and the 4′-carbon of the ribose sugar.

[0128] Nucleic acid(s) that are “complementary” or “complement(s)” are those that are capable of base-pairing according to the standard Watson-Crick, Hoogsteen or reverse Hoogsteen binding complementarity rules. As used herein, the term “complementary” or “complement(s)” may refer to nucleic acid(s) that are substantially complementary, as may be assessed by the same nucleotide comparison set forth above. The term “substantially complementary” may refer to a nucleic acid comprising at least one sequence of consecutive nucleobases, or semiconsecutive nucleobases if one or more nucleobase moieties are not present in the molecule, are capable of hybridizing to at least one nucleic acid strand or duplex even if less than all nucleobases do not base pair with a counterpart nucleobase. In certain embodiments, a “substantially complementary” nucleic acid contains at least one sequence in which about 70%, about 71%, about 72%, about 73%, about 74%, about 75%, about 76%, about 77%, about 77%, about 78%, about 79%, about 80%, about 81%, about 82%, about 83%, about 84%, about 85%, about 86%, about 87%, about 88%, about 89%, about 90%, about 91%, about 92%, about 93%, about 94%, about 95%, about 96%, about 97%, about 98%, about 99%, to about 100%, and any range therein, of the nucleobase sequence is capable of base-pairing with at least one single or double-stranded nucleic acid molecule during hybridization. In certain embodiments, the term “substantially complementary” refers to at least one nucleic acid that may hybridize to at least one nucleic acid strand or duplex in stringent conditions. In certain embodiments, a “partially complementary” nucleic acid comprises at least one sequence that may hybridize in low stringency conditions to at least one single or double-stranded nucleic acid, or contains at least one sequence in which less than about 70% of the nucleobase sequence is capable of base-pairing with at least one single or double-stranded nucleic acid molecule during hybridization.

[0129] “Incorporating,” as used herein, means becoming part of a nucleic acid polymer.

[0130] “Oligonucleotide,” as used herein, refers collectively and interchangeably to two terms of art, “oligonucleotide” and “polynucleotide.” Note that although oligonucleotide and polynucleotide are distinct terms of art, there is no exact dividing line between them and they are used interchangeably herein. The term “adaptor” may also be used interchangeably with the terms “oligonucleotide” and “polynucleotide.”

[0131] The term “primer” or “oligonucleotide primer” as used herein, refers to an oligonucleotide that hybridizes to the template strand of a nucleic acid and initiates synthesis of a nucleic acid strand complementary to the template strand when placed under conditions in which synthesis of a primer extension product is induced, i.e., in the presence of nucleotides and a polymerization-inducing agent such as a DNA or RNA polymerase and at suitable temperature, pH, metal concentration, and salt concentration. The primer is generally single-stranded for maximum efficiency in amplification, but may alternatively be double-stranded. If double-stranded, the primer can first be treated to separate its strands before being used to prepare extension products. This denaturation step is typically affected by heat, but may alternatively be carried out using alkali, followed by neutralization. Thus, a “primer” is complementary to a template, and complexes by hydrogen bonding or hybridization with the template to give a primer/template complex for initiation of synthesis by a polymerase, which is extended by the addition of covalently bonded bases linked at its 3′ end complementary to the template in the process of DNA or RNA synthesis.

[0132] “Amplification,” as used herein, refers to any in vitro process for increasing the number of copies of a nucleotide sequence or sequences. Nucleic acid amplification results in the incorporation of nucleotides into DNA or RNA. As used herein, one amplification reaction may consist of many rounds of DNA replication. For example, one PCR reaction may consist of 30-100 “cycles” of denaturation and replication.

[0133] “Polymerase chain reaction,” or “PCR,” means a reaction for the in vitro amplification of specific DNA sequences by the simultaneous primer extension of complementary strands of DNA. In other words, PCR is a reaction for making multiple copies or replicates of a target nucleic acid flanked by primer binding sites, such reaction comprising one or more repetitions of the following steps: (i) denaturing the target nucleic acid, (ii) annealing primers to the primer binding sites, and (iii) extending the primers by a nucleic acid polymerase in the presence of nucleoside triphosphates. Usually, the reaction is cycled through different temperatures optimized for each step in a thermal cycler instrument. Particular temperatures, durations at each step, and rates of change between steps depend on many factors well-known to those of ordinary skill in the art, e.g., exemplified by the references: McPherson et al, editors, PCR: A Practical Approach and PCR2: A Practical Approach (IRL Press, Oxford, 1991 and 1995, respectively).

[0134] “Nested PCR” refers to a two-stage PCR wherein the amplicon of a first PCR becomes the sample for a second PCR using a new set of primers, at least one of which binds to an interior location of the first amplicon. As used herein, “initial primers” or “first set of primers” in reference to a nested amplification reaction mean the primers used to generate a first amplicon, and “secondary primers” or “second set of primers” mean the one or more primers used to generate a second, or nested, amplicon. “Multiplexed PCR” means a PCR wherein multiple target sequences (or a single target sequence and one or more reference sequences) are simultaneously carried out in the same reaction mixture, e.g. Bernard et al, Anal. Biochem., 273: 221-228 (1999) (two-color real-time PCR). Usually, distinct sets of primers are employed for each sequence being amplified.

[0135] The term “barcode” refers to a nucleic acid sequence that is used to identify a single cell or a subpopulation of cells. Barcode sequences can be linked to a target nucleic acid of interest during amplification and used to trace back the amplicon to the cell from which the target nucleic acid originated. A barcode sequence can be added to a target nucleic acid of interest during amplification by carrying out PCR with a primer that contains a region comprising the barcode sequence and a region that is complementary to the target nucleic acid such that the barcode sequence is incorporated into the final amplified target nucleic acid product (i.e., amplicon). Barcodes can be included in either the forward primer or the reverse primer or both primers used in PCR to amplify a target nucleic acid.

[0136] The term “molecular identifier” (or “MID”) as used herein refers to a unique nucleotide sequence that is used to distinguish between a single cell or genome or a subpopulation of cells or genomes, and to distinguish duplicate sequences arising from amplification from those which are biological duplicates. MIDs may also be used to count the occurrences of specific, tagged sequences for absolute molecular counting. A MID can be linked to a target nucleic acid of interest by ligation prior to amplification, or during amplification (e.g., reverse transcription or PCR), and used to trace back the amplicon to the genome or cell from which the target nucleic acid originated. A MID can be added to a target nucleic acid by including the sequence in the adaptor to be ligated to the target. A MID can also be added to a target nucleic acid of interest during amplification by carrying out reverse transcription with a primer that contains a region comprising the barcode sequence and a region that is complementary to the target nucleic acid such that the barcode sequence is incorporated into the final amplified target nucleic acid product (i.e., amplicon). The MID may be any number of nucleotides of sufficient length to distinguish the MID from other MID. For example, a MID may be anywhere from 4 to 20 nucleotides long, such as 5 to 11, or 12 to 20. In particular aspects, the MID has a length of 6 random nucleotides. The term “molecular identifier,” “MID,” “molecular identification sequence,” “MIS,” “unique molecular identifier,” “UMI,” “molecular barcode,” “molecular identifier sequence”, “molecular tag sequence” and “barcode” are used interchangeably herein.

[0137] “Sample” means a material obtained or isolated from a fresh or preserved biological sample or synthetically-created source that contains nucleic acids of interest. In certain embodiments, a sample is the biological material that contains the variable immune region(s) for which data or information are sought. Samples can include at least one cell, fetal cell, cell culture, tissue specimen, blood, cells in leukapheresis chamber, serum, plasma, saliva, urine, tear, vaginal secretion, sweat, lymph fluid, cerebrospinal fluid, mucosa secretion, peritoneal fluid, ascites fluid, fecal matter, body exudates, umbilical cord blood, chorionic villi, amniotic fluid, embryonic tissue, multicellular embryo, lysate, extract, solution, or reaction mixture suspected of containing immune nucleic acids of interest. Samples can also include non-human sources, such as non-human primates, rodents and other mammals, other animals, plants, fungi, bacteria, and viruses.

### II. Antigen-Specific T Cell Isolation

[0138] Certain embodiments of the present disclosure concern obtaining a population of antigen-specific T cells which are used to determine the TCR sequence. Particularly, the present disclosure relates to a substantially pure antigen-specific T cell population having a functional status which is substantially unaltered by a purification procedure comprising staining the desired T cell population, isolating the stained T cell population from a sample comprising non-stained T cell population and removing said stain, i.e. the functional status of the T cell population before purification is substantially the same as after the purification. In particular aspects, a T cell population is provided which is substantially free from any binding reagents used for the isolation of the population, e.g. antibodies or TCR binding ligands such as multimeric TCR binding ligands. The T cells may be from an in vitro culture, or a physiologic sample. For the most part, the physiologic samples employed will be blood or lymph, but samples may also involve other sources of T cells, particularly where T cells may be invasive. Thus, other sites of interest are tissues, or associated fluids, as in the brain, lymph node, neoplasms, spleen, liver, kidney, pancreas, tonsil, thymus, joints, and synovia. Prior treatments may involve removal of cells by various techniques, including centrifugation, using Ficoll-Hypaque, panning, affinity separation, using antibodies specific for one or more markers present as surface membrane proteins on the surface of cells, or any other technique that provides enrichment of the set or subset of cells of interest.

[0139] A. Starting Population of T Cells

[0140] A starting population of T cells can be obtained from a patient sample or from a healthy blood donor. In some aspects, the sample is a blood sample such as peripheral blood sample or cells in leukapheresis chamber. The blood sample can be about 1 mL to about 500 mL, such as about 2 mL to 80 mL, such as about 50 mL. The sample can include at least 500 antigen-specific T cells, at least 250 antigen-specific T cells, at least 100 antigen-specific T cells or at least 10 antigen-specific T cells.

[0141] In some embodiments, the T cells are derived from the blood, bone marrow, lymph, or lymphoid organs. In some aspects, the cells are human cells. The cells typically are primary cells, such as those isolated directly from a subject and/or isolated from a subject and frozen. In some embodiments, the cells include one or more subsets of T cells or other cell types, such as whole T cell populations, CD4⁺ cells, CD8⁺ cells, and subpopulations thereof, such as those defined by function, activation state, maturity, potential for differentiation, expansion, recirculation, localization, and/or persistence capacities, antigen-specificity, type of antigen receptor, presence in a particular organ or compartment, marker or cytokine secretion profile, and/or degree of differentiation. With reference to the subject to be treated, the cells may be allogeneic and/or autologous. In some embodiments, the methods include isolating cells from the subject, preparing, processing, culturing, and/or engineering them, as described herein, and re-introducing them into the same patient, before or after cryopreservation.

[0142] Among the sub-types and subpopulations of T cells (e.g., CD4⁺ and/or CD8⁺ T cells) are naive T (TN) cells, effector T cells (TEFF), memory T cells and sub-types thereof, such as stem cell memory T (TSCM), central memory T (TCM), effector memory T (TEM), or terminally differentiated effector memory T cells, tumor-infiltrating lymphocytes (TIL), immature T cells, mature T cells, helper T cells, cytotoxic T cells, mucosa-associated invariant T (MAIT) cells, naturally occurring and adaptive regulatory T (Treg) cells, helper T cells, such as TH1 cells, TH2 cells, TH3 cells, TH17 cells, TH9 cells, TH22 cells, follicular helper T cells, alpha/beta T cells, and delta/gamma T cells.

[0143] In some embodiments, one or more of the T cell populations is enriched for or depleted of cells that are positive for a specific marker, such as surface markers, or that are negative for a specific marker. In some cases, such markers are those that are absent or expressed at relatively low levels on certain populations of T cells (e.g., non-memory cells) but are present or expressed at relatively higher levels on certain other populations of T cells (e.g., memory cells). In one embodiment, the cells (e.g., CD8⁺ cells or CD3⁺ cells) are enriched for (i.e., positively selected for) cells that are positive or expressing high surface levels of CD45RO, CCR7, CD28, CD27, CD44, CD127, and/or CD62L and/or depleted of (e.g., negatively selected for) cells that are positive for or express high surface levels of CD45RA. In some embodiments, cells are enriched for or depleted of cells positive or expressing high surface levels of CD122, CD95, CD25, CD27, and/or IL7-Ra (CD127). In some examples, CD8+ T cells are enriched for cells positive for CD45RO (or negative for CD45RA) and for CD62L.

[0144] In some embodiments, T cells are separated from a PBMC sample or cells in leukapheresis chamber by negative selection of markers expressed on non-T cells, such as B cells, monocytes, or other white blood cells, such as CD14. In some aspects, a CD4⁺ or CD8⁺ selection step is used to separate CD4⁺ helper and CD8⁺ cytotoxic T cells. Such CD4⁺ and CD8⁺ populations can be further sorted into sub-populations by positive or negative selection for markers expressed or expressed to a relatively higher degree on one or more naive, memory, and/or effector T cell subpopulations.

[0145] In some embodiments, the T cells are autologous T cells. In this method, tumor samples are obtained from patients and a single cell suspension is obtained. The single cell suspension can be obtained in any suitable manner, e.g., mechanically (disaggregating the tumor using, e.g., a gentleMACS™ Dissociator, Miltenyi Biotec, Auburn, Calif) or enzymatically (e.g., collagenase or DNase). Single-cell suspensions of tumor enzymatic digests are cultured in interleukin-2 (IL-2). The cells are cultured until confluence (e.g., about 2×10⁶ lymphocytes), e.g., from about 10 to about 30 days, such as about 15 to about 28 days.

[0146] The cultured T cells can be pooled and rapidly expanded. Rapid expansion provides an increase in the number of antigen-specific T-cells of at least about 50-fold (e.g., 50-, 60-, 70-, 80-, 90-, 100-, 150-fold or greater) over a period of about 10 to about 28 days. In particular, rapid expansion provides an increase of at least about 200-fold (e.g., 200-, 300-, 400-, 500-, 600-, 700-, 800-, 900-, 1000-fold or greater) over a period of about 10 to about 28 days. In some aspects, the TCR affinity is measured and/or sequence is obtained from T cells, such as tumor infiltrating lymphocytes with or without in vitro expansion.

[0147] B. Antigens

[0148] Any suitable antigen may find use in the present method. Exemplary antigens include, but are not limited to, antigenic molecules from infectious agents, auto-/self-antigens, tumor-/cancer-associated antigens, and tumor neoantigens (Linnemann et al., 2015).

[0149] Tumor-associated antigens may be derived from prostate, breast, colorectal, lung, pancreatic, renal, mesothelioma, ovarian, or melanoma cancers. Exemplary tumor-associated antigens or tumor cell-derived antigens include MAGE 1, 3, and MAGE 4 (or other MAGE antigens such as those disclosed in International Patent Publication No. WO99/40188); PRAME; BAGE; RAGE, Lage (also known as NY ESO 1); SAGE; and HAGE or GAGE. These non-limiting examples of tumor antigens are expressed in a wide range of tumor types such as melanoma, lung carcinoma, sarcoma, and bladder carcinoma. Prostate cancer tumor-associated antigens include, for example, prostate specific membrane antigen (PSMA), prostate-specific antigen (PSA), prostatic acid phosphates, NKX3.1, and six-transmembrane epithelial antigen of the prostate (STEAP). The tumor-associated antigen may be a testis antigen or germline cancer antigen, such as MAGE-A1, MAGE-A3, MAGE-A4, NY-ESO-1, PRAME, CT83 and SSX2.

[0150] Other tumor associated antigens include Plu-1, HASH-1, HasH-2, Cripto and Criptin. Additionally, a tumor antigen may be a self peptide hormone, such as whole length gonadotrophin hormone releasing hormone (GnRH, International Patent Publication No. WO 95/20600), a short 10 amino acid long peptide, useful in the treatment of many cancers.

[0151] Tumor antigens include tumor antigens derived from cancers that are characterized by tumor-associated antigen expression, such as HER-2/neu expression. Tumor-associated antigens of interest include lineage-specific tumor antigens such as the melanocyte-melanoma lineage antigens MART-1/Melan-A, gp1OO, gp75, mda-7, tyrosinase and tyrosinase-related protein. Illustrative tumor-associated antigens include, but are not limited to, tumor antigens derived from or comprising any one or more of, p53, Ras, c-Myc, cytoplasmic serine/threonine kinases (e.g., A-Raf, B-Raf, and C-Raf, cyclin-dependent kinases), MAGE-A1, MAGE-A2, MAGE-A3, MAGE-A4, MAGE-A6, MAGE-A 10, MAGE-A12, MART-1, BAGE, DAM-6, -10, GAGE-1, -2, -8, GAGE-3, -4, -5, -6, -7B, NA88-A, MART-1, MC1R, Gp1OO, PSA, PSM, Tyrosinase, TRP-1, TRP-2, ART-4, CAMEL, CEA, Cyp-B, hTERT, hTRT, iCE, MUC1, MUC2, Phosphoinositide 3-kinases (POKs), TRK receptors, PRAME, P15, RU1, RU2, SART-1, SART-3, Wilms' tumor antigen (WTi), AFP, -catenin/m, Caspase-8/m, CEA, CDK-4/m, ELF2M, GnT-V, G250, HSP70-2M, HST-2, KIAA0205, MUM-1, MUM-2, MUM-3, Myosin/m, RAGE, SART-2, TRP-2/INT2, 707-AP, Annexin II, CDC27/m, TPI/mbcr-abl, BCR-ABL, interferon regulatory factor 4 (IRF4), ETV6/AML, LDLR/FUT, Pml/RAR, Tumor-associated calcium signal transducer 1 (TACSTD1) TACSTD2, receptor tyrosine kinases (e.g., Epidermal Growth Factor receptor (EGFR) (in particular, EGFRvIII), platelet derived growth factor receptor (PDGFR), vascular endothelial growth factor receptor (VEGFR)), cytoplasmic tyrosine kinases (e.g., src-family, syk-ZAP70 family), integrin-linked kinase (ILK), signal transducers and activators of transcription STAT3, STATS, and STATE, hypoxia inducible factors (e.g., HIF-1 and HIF-2), Nuclear Factor-Kappa B (NF-B), Notch receptors (e.g., Notchl-4), c-Met, mammalian targets of rapamycin (mTOR), WNT, extracellular signal-regulated kinases (ERKs), and their regulatory subunits, PMSA, PR-3, MDM2, Mesothelin, renal cell carcinoma-5T4, SM22-alpha, carbonic anhydrases I (CAI) and IX (CAIX) (also known as G250), STEAD, TEL/AML1, GD2, proteinase3, hTERT, sarcoma translocation breakpoints, EphA2, ML-IAP, EpCAM, ERG (TMPRSS2 ETS fusion gene), NA17, PAX3, ALK, androgen receptor, cyclin B1, polysialic acid, MYCN, RhoC, GD3, fucosyl GM1, mesothelian, PSCA, sLe, PLAC1, GM3, BORIS, Tn, GLoboH, NY-BR-1, RGsS, SART3, STn, PAX5, OY-TES1, sperm protein 17, LCK, HMWMAA, AKAP-4, SSX2, XAGE 1, B7H3, legumain, TIE2, Page4, MAD-CT-1, FAP, MAD-CT-2, fos related antigen 1, CBX2, CLDN6, SPANX, TPTE, ACTL8, ANKRD30A, CDK 2A, MAD2L1, CTAG1B, SUNC1, LRRN1 and idiotype.

[0152] Antigens may include epitopic regions or epitopic peptides derived from genes mutated in tumor cells or from genes transcribed at different levels in tumor cells compared to normal cells, such as telomerase enzyme, survivin, mesothelin, mutated ras, bcr/abl rearrangement, Her2/neu, mutated or wild-type p53, cytochrome P450 1B1, and abnormally expressed intron sequences such as N-acetylglucosaminyltransferase-V; clonal rearrangements of immunoglobulin genes generating unique idiotypes in myeloma and B-cell lymphomas; tumor antigens that include epitopic regions or epitopic peptides derived from oncoviral processes, such as human papilloma virus proteins E6 and E7; Epstein bar virus protein LMP2; nonmutated oncofetal proteins with a tumor-selective expression, such as carcinoembryonic antigen and alpha-fetoprotein.

[0153] In other embodiments, an antigen is obtained or derived from a pathogenic microorganism or from an opportunistic pathogenic microorganism (also called herein an infectious disease microorganism), such as a virus, fungus, parasite, and bacterium. In certain embodiments, antigens derived from such a microorganism include full-length proteins.

[0154] Illustrative pathogenic organisms whose antigens are contemplated for use in the method described herein include human immunodeficiency virus (HIV), herpes simplex virus (HSV), respiratory syncytial virus (RSV), cytomegalovirus (CMV), Epstein-Barr virus (EBV), Influenza A, B, and C, vesicular stomatitis virus (VSV), vesicular stomatitis virus (VSV), Staphylococcus species including Methicillin-resistant Staphylococcus aureus (MRSA), and Streptococcus species including Streptococcus pneumoniae. As would be understood by the skilled person, proteins derived from these and other pathogenic microorganisms for use as antigen as described herein and nucleotide sequences encoding the proteins may be identified in publications and in public databases such as GENBANK®, SWISS-PROT®, and TREMBL®.

[0155] Antigens derived from human immunodeficiency virus (HIV) include any of the HIV virion structural proteins (e.g., gp120, gp41, p17, p24), protease, reverse transcriptase, or HIV proteins encoded by tat, rev, nef, vif, vpr and vpu.

[0156] Antigens derived from herpes simplex virus (e.g., HSV 1 and HSV2) include, but are not limited to, proteins expressed from HSV late genes. The late group of genes predominantly encodes proteins that form the virion particle. Such proteins include the five proteins from (UL) which form the viral capsid: UL6, UL18, UL35, UL38 and the major capsid protein UL19, UL45, and UL27, each of which may be used as an antigen as described herein. Other illustrative HSV proteins contemplated for use as antigens herein include the ICP27 (HI, H2), glycoprotein B (gB) and glycoprotein D (gD) proteins. The HSV genome comprises at least 74 genes, each encoding a protein that could potentially be used as an antigen.

[0157] Antigens derived from cytomegalovirus (CMV) include CMV structural proteins, viral antigens expressed during the immediate early and early phases of virus replication, glycoproteins I and III, capsid protein, coat protein, lower matrix protein pp65 (ppUL83), p52 (ppUL44), IE1 and 1E2 (UL123 and UL122), protein products from the cluster of genes from UL128-UL150 (Rykman, et al., 2006), envelope glycoprotein B (gB), gH, gN, and pp150. As would be understood by the skilled person, CMV proteins for use as antigens described herein may be identified in public databases such as GENBANK®, SWISS-PROT®, and TREMBL® (see e.g., Bennekov et al., 2004; Loewendorf et al., 2010; Marschall et al, 2009).

[0158] Antigens derived from Epstein-Ban virus (EBV) that are contemplated for use in certain embodiments include EBV lytic proteins gp350 and gp1 1O, EBV proteins produced during latent cycle infection including Epstein-Ban nuclear antigen (EBNA)-1, EBNA-2, EBNA-3A, EBNA-3B, EBNA-3C, EBNA-leader protein (EBNA-LP) and latent membrane proteins (LMP)-1, LMP-2A and LMP-2B (see, e.g., Lockey et al., 2008).

[0159] Antigens derived from respiratory syncytial virus (RSV) that are contemplated for use herein include any of the eleven proteins encoded by the RSV genome, or antigenic fragments thereof: NS 1, NS2, N (nucleocapsid protein), M (Matrix protein) SH, G and F (viral coat proteins), M2 (second matrix protein), M2-1 (elongation factor), M2-2 (transcription regulation), RNA polymerase, and phosphoprotein P.

[0160] Antigens derived from Vesicular stomatitis virus (VSV) that are contemplated for use include any one of the five major proteins encoded by the VSV genome, and antigenic fragments thereof: large protein (L), glycoprotein (G), nucleoprotein (N), phosphoprotein (P), and matrix protein (M) (see, e.g., Rieder et al., 1999).

[0161] Antigens derived from an influenza virus that are contemplated for use in certain embodiments include hemagglutinin (HA), neuraminidase (NA), nucleoprotein (NP), matrix proteins M1 and M2, NS1, NS2 (NEP), PA, PB1, PB1-F2, and PB2.

[0162] Exemplary viral antigens also include, but are not limited to, adenovirus polypeptides, alphavirus polypeptides, calicivirus polypeptides (e.g., a calicivirus capsid antigen), coronavirus polypeptides, distemper virus polypeptides, Ebola virus polypeptides, enterovirus polypeptides, flavivirus polypeptides, hepatitis virus (AE) polypeptides (a hepatitis B core or surface antigen, a hepatitis C virus E1 or E2 glycoproteins, core, or nonstructural proteins), herpesvirus polypeptides (including a herpes simplex virus or varicella zoster virus glycoprotein), infectious peritonitis virus polypeptides, leukemia virus polypeptides, Marburg virus polypeptides, orthomyxovirus polypeptides, papilloma virus polypeptides, parainfluenza virus polypeptides (e.g., the hemagglutinin and neuraminidase polypeptides), paramyxovirus polypeptides, parvovirus polypeptides, pestivirus polypeptides, pi coma virus polypeptides (e.g., a poliovirus capsid polypeptide), pox virus polypeptides (e.g., a vaccinia virus polypeptide), rabies virus polypeptides (e.g., a rabies virus glycoprotein G), reovirus polypeptides, retrovirus polypeptides, and rotavirus polypeptides.

[0163] In certain embodiments, the antigen may be bacterial antigens. In certain embodiments, a bacterial antigen of interest may be a secreted polypeptide. In other certain embodiments, bacterial antigens include antigens that have a portion or portions of the polypeptide exposed on the outer cell surface of the bacteria.

[0164] Antigens derived from Staphylococcus species including Methicillin-resistant Staphylococcus aureus (MRSA) that are contemplated for use include virulence regulators, such as the Agr system, Sar and Sae, the Arl system, Sar homologues (Rot, MgrA, SarS, SarR, SarT, SarU, SarV, SarX, SarZ and TcaR), the Srr system and TRAP. Other Staphylococcus proteins that may serve as antigens include Clp proteins, HtrA, MsrR, aconitase, CcpA, SvrA, Msa, CfvA and CfvB (see, e.g., Staphylococcus: Molecular Genetics, 2008 Caister Academic Press, Ed. Jodi Lindsay). The genomes for two species of Staphylococcus aureus (N315 and Mu50) have been sequenced and are publicly available, for example at PATRIC (PATRIC: The VBI PathoSystems Resource Integration Center, Snyder et al., 2007). As would be understood by the skilled person, Staphylococcus proteins for use as antigens may also be identified in other public databases such as GENBANK®, SWISS-PROT®, and TREMBL®.

[0165] Antigens derived from Streptococcus pneumoniae that are contemplated for use in certain embodiments described herein include pneumolysin, PspA, choline-binding protein A (CbpA), NanA, NanB, SpnHL, PavA, LytA, Pht, and pilin proteins (RrgA; RrgB; RrgC). Antigenic proteins of Streptococcus pneumoniae are also known in the art and may be used as an antigen in some embodiments (Zysk et al, 2000). The complete genome sequence of a virulent strain of Streptococcus pneumoniae has been sequenced and, as would be understood by the skilled person, S. pneumoniae proteins for use herein may also be identified in other public databases such as GENBANK®, SWISS-PROT®, and TREMBL®. Proteins of particular interest for antigens according to the present disclosure include virulence factors and proteins predicted to be exposed at the surface of the pneumococci (Frolet et al., 2010).

[0166] Examples of bacterial antigens that may be used as antigens include, but are not limited to, Actinomyces polypeptides, Bacillus polypeptides, Bacteroides polypeptides, Bordetella polypeptides, Bartonella polypeptides, Borrelia polypeptides (e.g., B. burgdorferi OspA), Brucella polypeptides, Campylobacter polypeptides, Capnocytophaga polypeptides, Chlamydia polypeptides, Corynebacterium polypeptides, Coxiella polypeptides, Dermatophilus polypeptides, Enterococcus polypeptides, Ehrlichia polypeptides, Escherichia polypeptides, Francisella polypeptides, Fusobacterium polypeptides, Haemobartonella polypeptides, Haemophilus polypeptides (e.g., H. influenzae type b outer membrane protein), Helicobacter polypeptides, Klebsiella polypeptides, L-form bacteria polypeptides, Leptospira polypeptides, Listeria polypeptides, Mycobacterium polypeptides, Mycoplasma polypeptides, Neisseria polypeptides, Neorickettsia polypeptides, Nocardia polypeptides, Pasteurella polypeptides, Peptococcus polypeptides, Peptostreptococcus polypeptides, Pneumococcus polypeptides (i.e., S. pneumoniae polypeptides), Proteus polypeptides, Pseudomonas polypeptides, Rickettsia polypeptides, Rochalimaea polypeptides, Salmonella polypeptides, Shigella polypeptides, Staphylococcus polypeptides, group Astreptococcus polypeptides (e.g., S. pyogenes M proteins), group B streptococcus (S. agalactiae) polypeptides, Treponema polypeptides, and Yersinia polypeptides (e.g., Y. pestis F1 and V antigens).

[0167] Examples of fungal antigens include, but are not limited to, Absidia polypeptides, Acremonium polypeptides, Alternaria polypeptides, Aspergillus polypeptides, Basidiobolus polypeptides, Bipolaris polypeptides, Blastomyces polypeptides, Candida polypeptides, Coccidioides polypeptides, Conidiobolus polypeptides, Cryptococcus polypeptides, Curvalaria polypeptides, Epidermophyton polypeptides, Exophiala polypeptides, Geotrichum polypeptides, Histoplasma polypeptides, Madurella polypeptides, Malassezia polypeptides, Microsporum polypeptides, Moniliella polypeptides, Mortierella polypeptides, Mucor polypeptides, Paecilomyces polypeptides, Penicillium polypeptides, Phialemonium polypeptides, Phialophora polypeptides, Prototheca polypeptides, Pseudallescheria polypeptides, Pseudomicrodochium polypeptides, Pythium polypeptides, Rhinosporidium polypeptides, Rhizopus polypeptides, Scolecobasidium polypeptides, Sporothrix polypeptides, Stemphylium polypeptides, Trichophyton polypeptides, Trichosporon polypeptides, and Xylohypha polypeptides.

[0168] Examples of protozoan parasite antigens include, but are not limited to, Babesia polypeptides, Balantidium polypeptides, Besnoitia polypeptides, Cryptosporidium polypeptides, Eimeria polypeptides, Encephalitozoon polypeptides, Entamoeba polypeptides, Giardia polypeptides, Hammondia polypeptides, Hepatozoon polypeptides, Isospora polypeptides, Leishmania polypeptides, Microsporidia polypeptides, Neospora polypeptides, Nosema polypeptides, Pentatrichomonas polypeptides, Plasmodium polypeptides. Examples of helminth parasite antigens include, but are not limited to, Acanthocheilonema polypeptides, Aelurostrongylus polypeptides, Ancylostoma polypeptides, Angiostrongylus polypeptides, Ascaris polypeptides, Brugia polypeptides, Bunostomum polypeptides, Capillaria polypeptides, Chabertia polypeptides, Cooperia polypeptides, Crenosoma polypeptides, Dictyocaulus polypeptides, Dioctophyme polypeptides, Dipetalonema polypeptides, Diphyllobothrium polypeptides, Diplydium polypeptides, Dirofllaria polypeptides, Dracunculus polypeptides, Enterobius polypeptides, Filaroides polypeptides, Haemonchus polypeptides, Lagochilascaris polypeptides, Loa polypeptides, Mansonella polypeptides, Muellerius polypeptides, Nanophyetus polypeptides, Necator polypeptides, Nematodirus polypeptides, Oesophagostomum polypeptides, Onchocerca polypeptides, Opisthorchis polypeptides, Ostertagia polypeptides, Parafilaria polypeptides, Paragonimus polypeptides, Parascaris polypeptides, Physaloptera polypeptides, Protostrongylus polypeptides, Setaria polypeptides, Spirocerca polypeptides Spirometra polypeptides, Stephanofilaria polypeptides, Strongyloides polypeptides, Strongylus polypeptides, Thelazia polypeptides, Toxascaris polypeptides, Toxocara polypeptides, Trichinella polypeptides, Trichostrongylus polypeptides, Trichuris polypeptides, Uncinaria polypeptides, and Wuchereria polypeptides, (e.g., P. falciparum circumsporozoite (PfCSP)), sporozoite surface protein 2 (PfSSP2), carboxyl terminus of liver state antigen 1 (PfLSAl c-term), and exported protein 1 (PfExp-1), Pneumocystis polypeptides, Sarcocystis polypeptides, Schistosoma polypeptides, Theileria polypeptides, Toxoplasma polypeptides, and Trypanosoma polypeptides.

[0169] Examples of ectoparasite antigens include, but are not limited to, polypeptides (including antigens as well as allergens) from fleas; ticks, including hard ticks and soft ticks; flies, such as midges, mosquitoes, sand flies, black flies, horse flies, horn flies, deer flies, tsetse flies, stable flies, myiasis-causing flies and biting gnats; ants; spiders, lice; mites; and true bugs, such as bed bugs and kissing bugs.

[0170] In some embodiments, the antigen is an autoantigen. In one embodiment, the autoantigen is a type 1 diabetes autoantigen, including, but not limited to, insulin, pre-insulin, PTPRN, PDX1, ZnT8, CHGA IAAP, GAD(65) and/or DiaPep277. In one embodiment, the autoantigen is an alopecia areata autoantigen, including, but not limited to, keratin 16, K18585, M1 0510, J01523, 022528, D04547, 005529, B20572 and/or F11552. In one embodiment, the autoantigen is a systemic lupus erythematosus autoantigen, including, but not limited to, TRIM21/Ro52/SS-A 1 and/or histone H2B. In one embodiment, the autoantigen is a Behcet's disease autoantigen, including, but not limited to, S-antigen, alpha-enolase, selenium binding partner and/or Sipl C-ter. In one embodiment, the autoantigen is a Sjogren's syndrome autoantigen, including, but not limited to, La/SSB, KLK11 and/or a 45-kd nucleus protein. In one embodiment, the autoantigen is a rheumatoid arthritis autoantigen, including, but not limited to, vimentin, gelsolin, alpha 2 HS glycoprotein (AHSG), glial fibrillary acidic protein (GFAP), alB-glycoprotein (A1BG), RA33 and/or citrullinated 31F4G1. In one embodiment, the autoantigen is a Grave's disease autoantigen. In one embodiment, the autoantigen is an antiphospholipid antibody syndrome autoantigen, including, but not limited to, zwitterionic phospholipids, phosphatidyl-ethanolamine, phospholipid-binding plasma protein, phospholipid-protein complexes, anionic phospholipids, cardiolipin, β2-glycoprotein I (β2GPI), phosphatidylserine, lyso(bis)phosphatidic acid, phosphatidylethanolamine, vimentin and/or annexin A5. In one embodiment, the autoantigen is a multiple sclerosis autoantigen, including, but not limited to, myelin-associated oligodendrocytic basic protein (MOBP), myelin basic protein (MBP), myelin proteolipid protein (PLP), myelin oligodendrocyte glycoprotein (MOG) and/or alpha-B-crytallin. In one embodiment, the autoantigen is an irritable bowel disease autoantigen, including, but not limited to, a ribonucleoprotein complex, a small nuclear ribonuclear polypeptide A and/or Ro-5,200 kDa. In one embodiment, the autoantigen is a Crohn's disease autoantigen, including, but not limited to, zymogen granule membrane glycoprotein 2 (GP2), an 84 by allele of CTLA-4 AT repeat polymorphism, MRP 8, MRP 14 and/or complex MRP8/14. In one embodiment, the autoantigen is a dermatomyositis autoantigen, including, but not limited to, aminoacyl-tRNA synthetases, Mi-2 helicase/deacetylase protein complex, signal recognition particle (SRP), T2F1-Y, MDAS, NXP2, SAE and/or HMGCR. In one embodiment, the autoantigen is an ulcerative colitis autoantigen, including, but not limited to, 7E12H12 and/or M(r) 40 kD autoantigen.

[0171] In some embodiments, the autoantigen is a collagen, e.g., collagen type II; other collagens such as collagen type IX, collagen type V, collagen type XXVII, collagen type XVIII, collagen type IV, collagen type IX; aggrecan I; pancreas-specific protein disulphide isomerise A2; interphotoreceptor retinoid binding protein (IRBP); a human IRBP peptide 1-20; protein lipoprotein; insulin 2; glutamic acid decarboxylase (GAD) 1 (GAD67 protein), BAFF, IGF2. Further examples of autoantigens include ICA69 and CYP1A2, Tph and Fabp2, Tgn, Spt1 & 2 and Mater, and the CB11 peptide from collagen.

[0172] In some aspects, the peptide antigens are continuous segments of a protein. In other aspects, the peptide antigen comprises multiple segments from the same or different proteins. The multiple segments can bind to MHC and form a linear peptide sequence. The peptide sequence may be informatically predicted to bind to a certain MHC allele. The peptide sequence may be experimentally validated.

[0173] C. Isolation by DNA-pMHC Multimers

[0174] In some embodiments, the present disclosure provides a DNA-pMHC multimer for isolation of antigen-specific T cells. The DNA-pMHC multimer may comprise a multimer backbone, multiple pMHCs, and a peptide-encoding oligonucleotide, optionally comprising a DNA handle comprise a DNA barcode.

[0175] The multimer backbone may comprise multiple protein subunits to which MHC, a peptide-encoding oligonucleotide, and/or a DNA barcode are attached. The multimer backbone may comprise 2-20 subunits, such as 2, 3, 4, 5, 6, 7, 8, 9, 10, 11, 12, 13, 14, 15, 16, 17, 18, 19, or 20 subunits. The protein subunits may be comprised of streptavidin or a glucan, such as dextran.

[0176] The multimer backbone may be attached to 2 or more MHCs, such as 2-20, such as 2, 3, 4, 5, 6, 7, 8, 9, 10, 11, 12, 13, 14, 15, 16, 17, 18, 19, or 20 MHCs. In particular aspects, the multimer backbone is a tetramer, pentamer, octamer, or dodecamer. The MHC may be a class I MHC, a class II MHC, a CD1, or a MHC-like molecule. For MHC class I the presenting peptide is a 9-1 1 mer peptide; for MHC class II, the presenting peptide is 12-18mer peptides. For alternative MHC-molecules it may be fragments from lipids or gluco-molecules which are presented. In some aspects, the multimer backbone is a PROS@ MHC Class I Pentamer (ProImmune), a dodecamer comprising a biotinylated scaffold protein linked to four streptavidin tetramers, each capable of binding three biotinylated pMHC monomers (Huang et al., PNAS, 113(13); E1890-E1897, 2016), a MHC I streptamer (Iba), or a MHC-dextramer (Immudex).

[0177] In some aspects, the multimer backbone is a tetravalent conjugates (e.g., MHC I STREPTAMERS®) which comprise four identical subunits of a single ligand (e.g., peptide-major histocompatibility complexes (pMHC)) which specifically binds to the TCR and has a detectable label.

[0178] The multimer backbone may be attached to one or more peptide-encoding oligonucleotides. The peptide encoded by the oligonucleotide preferably has the same sequence as the peptide for the peptide of the pMHC complex. The peptide-encoding oligonucleotide may be linked to the multimer backbone through a DNA handle, referred to herein as a DNA oligonucleotide segment comprising at least one primer set for amplifying the oligonucleotide. The DNA handle may further encode a partial FLAG peptide. In particular aspects, the DNA handle further comprises a 10-14, such as 12, base pair degenerate region that serves as a unique molecular identifier or barcode. In some embodiments, there is provided a multimer backbone linked to a DNA handle. Thus, the peptide maybe be identified by sequencing rather than flow cytometry.

[0179] Further provided herein are methods for producing a DNA-pMHC multimer comprising the multimer backbone attached to multiple MHCs and the peptide-encoding oligonucleotide which can comprise the DNA handle. The peptide of the pMHC may have a length of about 8 to about 25 amino acids and may comprise anchor amino acid residues capable of allele-specific binding to a predetermined MHC molecule class, e.g. an MHC class I, an MHC class II or a non-classical MHC class. In particular aspects, the MHC molecule is an MHC class I molecule. Included in the HLA proteins are the class II subunits HLA-DPa, HLA-\ddot{υ}Pβ, HLA-DQa, HLA-DQ, HLA-DRa and HLA-DR, and the class I proteins HLA-A, HLA-B, HLA-C, and β2-microglobulin. The peptides of the pMHC complex may have a sequence derived from a wide variety of proteins. The T cell epitopic sequences from a number of antigens are known in the art. Alternatively, the epitopic sequence may be empirically determined, by isolating and sequencing peptides bound to native MHC proteins, by synthesis of a series of peptides from the target sequence, then assaying for T cell reactivity to the different peptides, or by producing a series of binding complexes with different peptides and quantitating the T cell binding. Alternatively, the epitopic sequence may be informatically predicted to bind to certain MHC alleles. Preparation of fragments, identifying sequences, and identifying the minimal sequence is described in U.S. Pat. No. 5,019,384; incorporated herein by reference. The peptides may be prepared in a variety of ways. Conveniently, they can be synthesized by conventional techniques employing automatic synthesizers, or may be synthesized manually. Alternatively, DNA sequences can be prepared which encode the particular peptide. The peptides may be generated by in vitro transcription/translation from the known DNA sequence. Alternatively, the DNA sequence may be cloned and expressed to provide the desired peptide. In this instance a methionine may be the first amino acid. In addition, peptides may be produced by recombinant methods as a fusion to proteins that are one of a specific binding pair, allowing purification of the fusion protein by means of affinity reagents, followed by proteolytic cleavage, usually at an engineered site to yield the desired peptide (see, e.g., Driscoll et al., 1993). The peptides may also be isolated from natural sources and purified by known techniques, including, for example, chromatography on ion exchange materials, separation by size, immunoaffinity chromatography and electrophoresis.

[0180] In one embodiment, a synthetic single-stranded DNA oligonucleotide that encodes the peptide is obtained and is utilized as a DNA template to produce the peptide using in vitro transcription/translation (IVTT) (Shimzu et al., Nat Biotechnol, 19(8): 751-5, 2001) and as the peptide-encoding oligonucleotide attached to the DNA-pMHC multimer.

[0181] For the IVTT, the peptide-encoding oligonucleotide may be amplified by polymerase chain reaction (PCR) to include adapters that allows for IVTT. The peptide-encoding sequence may comprise a partial FLAG peptide at the N-terminus, followed by the peptide of interest. During IVTT, enterokinase may be added to the solution to cleave off the FLAG peptide so that peptides without a methionine at the P1 position of the N-terminus can be produced. After IVTT, a biotinylated pMHC monomer containing a temporary peptide, such as a UV-cleavable peptide, may be added to the solution. The temporary peptide can then be switched with the target peptide.

[0182] In some aspects, MHC monomers can be generated which allow for conditional release of the MHC ligand, such as by UV irradiation (Rodenko et al., 2006) for switching the temporary and target peptides. This UV switching method comprises exposing the solution to UV light, allowing for dissociation of the temporary UV-cleavable peptide and association of the MHC with the target peptide produced by IVTT.

[0183] In other aspects, the exchange of the temporary peptide may be by chemical methods, such as biorthogonal cleavage and exchange by employing azobenzene-containing peptides (Choo et al., Angewandte Chemie International Edition, 53(49), 2014). In another method, the peptide of the pMHC may be exchanged with the target peptide by re-folding of the MHC protein in the presence of the target peptide to produce the desired pMHC (Leisner et al., PLOS One, 2008). Alternatively, the pMHC may be generated by using CLIP peptide exchange for MHC Class II (Day et al., J Clin Invest, 112)6) 831-42, 2003). In some aspects, the pMHCs may be generated by using the QUICKSWITCH™ Custom Tetramer Kit or the FLET-T™ Kit. In other aspects, the peptide of the pMHC may be exchanged with the target peptide by temperature change of the MHC protein in the presence of the target peptide to produce the desired pMHC (Luimstra et al., 2018).

[0184] In the second part of the method for producing the DNA-pMHC multimer, the peptide-encoding oligonucleotide may be annealed to a linker oligonucleotide (or DNA handle) and gap-filled using a polymerase to create a double-stranded fragment. The peptide-encoding oligonucleotide or DNA handle may be attached to the multimer backbone by methods known in the art, such as through covalent interactions, such as by a HyNic-4FB crosslink or Tetrazine-TCO crosslink, or by streptavidin-biotin interactions. In one method, the DNA handle is attached to the multimer backbone using SOLULINK®. The multimer backbone, such as streptavidin tetramer, and the oligonucleotide may be added at a molar ratio of 0.1-20, such as 3-7, such as 0.1, 3, 4, 5, 5.8, 6, or, 7, or more or fewer multimers to each oligonucleotide. The excess oligonucleotide may be removed by wash steps, such as 1, 2, 3, 4, 5, 6, 7, 8, 9, or 10, particularly 6, wash steps in a protein concentrator.

[0185] In one specific method, the linker oligonucleotide or DNA handle itself is already covalently linked to a R-phycoerythrin-streptavidin or Allophycocyanin-streptavidin conjugate. The linker sequence or DNA handle may comprise of (1) a region that's complementary to the peptide-encoding oligonucleotide, (2) a 12 base pair degenerate region that serves as a unique molecular identifier, and (3) a primer region. The resulting product is a MHC multimer, such as a fluorescent streptavidin conjugate, that is covalently linked to a double stranded DNA fragment containing the peptide-encoding sequence.

[0186] To create the final DNA-pMHC tetramer, the pMHC multimer, such as a fluorescent streptavidin conjugate, from the second part of the method is added to the IVTT solution in the first part of the method that contains the biotinylated pMHC to produce the final DNA-pMHC tetramer.

[0187] The multimer backbone may be labeled by one or more detectable labels, such as one or more fluorophores. Exemplary fluorophores include PE, PE-Cy5, PE-Cy7, APC, APC-Cy7, Qdot 565, qdot 605, Qdot 655, Qdot 705, Brilliant Violet (BV) 421, BV 605, BV 510, BV 711, BV786, PerCP, PerCP/Cy5.5, Alexa Fluor 488, Alexa Fluor 647, FITC, BV570, BV650, DyLignt 488, Dylight 649, and PE/Dazzle 594.

[0188] The labeled pMHC multimer may be free in solution, or may be attached to an insoluble support. Examples of suitable insoluble supports include beads, e.g. magnetic beads, membranes and microliter plates. These are typically made of glass, plastic (e.g. polystyrene), polysaccharides, nylon or nitrocellulose. In general, the label will have a light detectable characteristic. Preferred labels are fluorophores, such as fluorescein isothiocyanate (FITC), rhodamine, Texas Red, phycoerythrin and allophycocyanin. Other labels of interest may include dyes, enzymes, chemiluminescers, particles, radioisotopes, nucleic acids or other directly or indirectly detectable agent.

[0189] A number of methods for detection and quantitation of labeled cells are known in the art. Flow cytometry is a convenient means of enumerating cells that are a small percent of the total population. Fluorescent microscopy may also be used. Various immunoassays, e.g. ELISA, RIA, etc. may be used to quantitate the number of cells present after binding to an insoluble support. In particular aspects, flow cyometry is used for the separation of a labeled subset of T cells from a complex mixture of cells.

[0190] Alternative means of separation utilize the binding complex bound directly or indirectly to an insoluble support, e.g. column, microtiter plate, magnetic beads, etc. The cell sample is added to the binding complex. The complex may be bound to the support by any convenient means. After incubation, the insoluble support is washed to remove non-bound components. From one to six washes may be employed, with sufficient volume to thoroughly wash non-specifically bound cells present in the sample. The desired cells are then eluted from the binding complex. In particular the use of magnetic particles to separate cell subsets from complex mixtures is described in Miltenyi et al, 1990.

[0191] In some embodiments, the T cells which bind the specific pMHC can then be isolated by sorting for the detectable label. The separation of T cell, from other sample components, e.g. unstained T cells may be effected by conventional methods, e.g. cell sorting, preferably by FACS methods using commercially available systems (e.g. FACSVantage by Becton Dickinson or Moflo by Cytomation), or by magnetic cell separation (e.g. MACS by Miltenyi). The staining may be removed from the T cell by disruption of the reversible bond which results in a complete removal of any reagent bound to the target cell, because the bond between the receptor-binding component and the receptor on the target cell is a low-affinity interaction.

[0192] Further provided herein are methods of using the DNA-pMHC multimer by contacting it to T cells. T cells bearing a TCR that binds to the particular target pMHC will bind to the DNA-pMHC multimer. The T cell bound-DNA-pMHC multimer is then sorted into lysis buffer based on the detectable label, such as fluorescence. An amplification scheme may then be used to prepare a DNA library, consisting of both the TCR sequence and the DNA barcode, which can be sequenced using next generation sequencing platforms (TetTCR-seq).

[0193] The TetTCR-seq may be used to identify non-cross reactive, neoantigen-specific TCR sequences. DNA-pMHC multimers containing the neoantigen peptide are produced in one fluorescent channel (e.g., Allophycocyanin/R-Phycoerythrin), and the corresponding DNA-pMHC multimer containing the wildtype peptide are produced in another fluorescent channel. Multiple neoantigen/wildtype DNA-pMHC multimer pairs can be included in the same two fluorescent channels and in the same staining solution, since the peptide can be deconvoluted at the sequence level.

### III. TCR Sequencing

[0194] Methods are also provided herein for the sequencing of the TCR. In some embodiments, methods are provided for the simultaneous sequencing of TCRα and TCRβ genes, DNA-barcode encoding for antigenic peptide sequences, and amplification of transcripts of functional interest in the single T cells which enable linkage of TCR specificity with information about T cell function. The methods generally involve sorting of single T cells into separate locations (e.g., separate wells of a multi-well titer plate) followed by nested polymerase chain reaction (PCR) amplification of nucleic acids encoding TCRs, DNA-barcode encoding for antigenic peptide sequences and T cell phenotypic markers. The amplicons are barcoded to identify their cell of origin, combined, and analyzed by deep sequencing.

[0195] In one method, a nested PCR approach is used in combination with deep sequencing such as described in Han et al., incorporated herein by reference, with modifications. Briefly, single T cells are sorted into separate wells (e.g., 96- or 384-well PCR plate) and reverse transcription is performed using TCR primers and phenotyping primers. In order to amplify unknown TCR sequences, ligation anchor PCR may be used. One amplification primer is specific for a TCR constant region. The other primer is ligated to the terminus of cDNA synthesized from TCR encoding mRNA. The variable region is amplified by PCR between the constant region sequence and the ligated primer. Included in this first reaction are also primers to serve as hybridization locations for barcoding primers in subsequent amplification reactions. Next, nested PCR is performed with TCRα/TCR primers (e.g., sequences in Table 1) and a third reaction is performed to incorporate individual barcodes. The products are combined, purified and sequenced using a next generation sequencing platform, such as but not limited to the Illumina® HiSEQ™ system (e.g., HiSEQ2000™ and HiSEQIOOO™), the MiSEQ™ system and SOLEXA sequencing, Helicos True Single Molecule Sequencing (tSMS), the Roche 454 sequencing platform and Genome Sequencer FLX systems, the Life Technology SOLiD sequencing platform and IonTorrent system, the single molecule, real-time (SMRT™) technology of Pacific Bioscience, and nanopore sequencing. The resulting paired-end sequencing reads are assembled and deconvoluted using barcode identifiers at both ends of each sequence by a custom software pipeline to separate reads from every well in every plate. For TCR sequences, the CDR3 nucleotide sequences are then extracted and translated.

### IV. Production of T Cell Lines

[0196] Methods are also provided herein for the generation of T cell lines. In some embodiments, methods are provided for the generation of T cell lines using a DNA-BC pMHC multimer pool. The methods will generally involve separation of T cells from PBMCs, concentration, stimulation of T cells with DNA-BC pMHC multimers comprising antigens of interest, and sorting them by flow cytometry. Stimulated T cells may then be cultured for use in subsequent experiments.

[0197] In one method, T cell lines are generated according to previously published protocol (Yu et al., 2015; Zhang et al., 2016), but using the DNA-BC pMHC multimer pool to stimulate and provide a functional fluorophore for subsequent separation. Cells may then be gated by flow cytometry. Single or 5 or more cells from the same population (Neo⁺WT⁻, Neo⁻WT⁺, Neo⁺WT⁺) may be sorted into each well for subsequent culture.

### V. RNA Sequencing

[0198] RNA sequencing (RNA-seq) is a well-established method for analyzing gene expression. A variety of methodologies for RNA-seq exist. See, for example, U.S. patent application Ser. No. 14/912,556, U.S. Pat. No. 5,962,272, both of which are incorporated herein by reference. Generally, methods for RNA-seq begin by generating a cDNA from the RNA by reverse transcription. In this process, a primer is hybridized to the 3′ end of the RNA, and a reverse transcriptase extends from the primer, synthesizing complementary DNA. A second primer then hybridizes to the 3′ end of the nascent cDNA, and either a DNA polymerase, or the same reverse transcriptase extends from the primer, and synthesizes a complementary strand, thereby generating double stranded DNA, after which logarithmic amplification can begin (i.e. PCR). Many methods of cDNA synthesis utilize the poly(A) tail of the mRNA as the starting point for cDNA synthesis and utilize a first primer which has a stretch of T nucleotides, complementary to the poly(A) tail. Some methods then use random primers as the other primers, though this has proved to cause consistent bias. As practiced in U.S. patent application Ser. No. 14/912,556 and U.S. Pat. No. 5,962,272, certain reverse transcriptases can add extra non-templated nucleotides to the end of a sequence, and then switch templates to a primer which binds there. This allows for the addition of the second primer, with very low bias.

[0199] Further embodiments of the present disclosure concern highly multiplexed 3′ end RNA sequencing to analyze the gene expression of a plurality of single cells (FIG. 23). These methods use the template switch activity of particular reverse transcriptases, as described above, to add a template switch primer comprising a restriction endonuclease site. The reverse transcription (RT) primer includes a cellular barcode and a restriction enzyme (e.g., SalI or Spel) site is incorporated on the template switching oligo (TSO). In one method, the RT primer and the template switch primer comprise the sequences in Table 1. RT primers with unique cell barcodes may then be individually dispensed into wells. These wells may be in a 96-, 384, or nanowell plate. Target cells are then sorted by FACS, adding single cells to each well or by dispersing. These cells are then lysed. cDNA amplification is performed similarly to the Smart-Seq2 protocol, but with the primers provided in Table 1 (Picelli et al., 2013). After cDNA amplification, multiple single cell PCR products are pooled, each of which has the unique cell barcode at the 3′ end to differentiate the individual cells during analysis. After purification, PCR products are digested by restriction enzyme incubation. Digested products may be used for preparing a DNA library, such as by using a modified Nextera XT DNA library prep kit, where custom primers designed to enrich 3′ end are used to prepare sequencing libraries.

TABLE 1
Oligo Sequences.

| Oligo # | Oligo sequences 5′ to 3′ |
|---|---|
| SEQ ID | /5AmMC12//iSp18/ TAG TAC TCA GAG GTT GAT CTA CAT TG (N:25252525)(N)(N) (N)(N)(N) |
| NO. 1 | (N)(N)(N)(N)(N)(N) GAC GAT GAC GAC AAG |
| SEQ ID | GCG AAT TAA TAC GAC TCA CTA TAG GGC TTA AGT ATA AGG AGG AAA ACA T ATG GAC GAT |
| NO. 2 | GAC GAC AAG |
| SEQ ID | AAA CCC CTC CGT HA GAG AGG GGT TA TGC TAG CGA GGT GCT TCG TTA |
| NO. 3 | |
| SEQ ID | TCA GAG GH GAT CTA CAT TG |
| NO. 4 | |
| SEQ ID | AG CGA GGT GCT TCG TTA |
| NO. 5 | |
| SEQ ID | GACGTGTGCTCTTCCGATCT NHNHN ATCACG TAC TCA GAG GTT GAT CTA CAT TG |
| NO. 6 | |
| SEQ ID | GACGTGTGCTCTTCCGATCT NHNHN CGATGT TAC TCA GAG GTT GAT CTA CAT TG |
| NO. 7 | |
| SEQ ID | GACGTGTGCTCTTCCGATCT NHNHN TTAGGC TAC TCA GAG GTT GAT CTA CAT TG |
| NO. 8 | |
| SEQ ID | GACGTGTGCTCTTCCGATCT NHNHN TGACCA TAC TCA GAG GTT GAT CTA CAT TG |
| NO. 9 | |
| SEQ ID | GACGTGTGCTCTTCCGATCT NHNHN ACAGTG TAC TCA GAG GTT GAT CTA CAT TG |
| NO. 10 | |
| SEQ ID | GACGTGTGCTCTTCCGATCT NHNHN GCCAAT TAC TCA GAG GTT GAT CTA CAT TG |
| NO. 11 | |
| SEQ ID | GACGTGTGCTCTTCCGATCT NHNHN CAGATC TAC TCA GAG GTT GAT CTA CAT TG |
| NO. 12 | |
| SEQ ID | GACGTGTGCTCTTCCGATCT NHNHN ACTTGA TAC TCA GAG GTT GAT CTA CAT TG |
| NO. 13 | |
| SEQ ID | GACGTGTGCTCTTCCGATCT NHNHN GATCAG TAC TCA GAG GTT GAT CTA CAT TG |
| NO. 14 | |
| SEQ ID | GACGTGTGCTCTTCCGATCT NHNHN TAGCTT TAC TCA GAG GTT GAT CTA CAT TG |
| NO. 15 | |
| SEQ ID | GACGTGTGCTCTTCCGATCT NHNHN GGCTAC TAC TCA GAG GTT GAT CTA CAT TG |
| NO. 16 | |
| SEQ ID | GACGTGTGCTCTTCCGATCT NHNHN CTTGTA TAC TCA GAG GTT GAT CTA CAT TG |
| NO. 17 | |
| SEQ ID | ACACTCTTTCCCTACACGACGCTCTTCCGATCT NHNHN TCAAG AG CGA GGT GCT TCG TTA |
| NO. 18 | |
| SEQ ID | ACACTCTTTCCCTACACGACGCTCTTCCGATCT NHNHN AACAC AG CGA GGT GCT TCG TTA |
| NO. 19 | |
| SEQ ID | ACACTCTTTCCCTACACGACGCTCTTCCGATCT NHNHN ACATA AG CGA GGT GCT TCG TTA |
| NO. 20 | |
| SEQ ID | ACACTCTTTCCCTACACGACGCTCTTCCGATCT NHNHN TAAGA AG CGA GGT GCT TCG TTA |
| NO. 21 | |
| SEQ ID | ACACTCTTTCCCTACACGACGCTCTTCCGATCT NHNHN TCAAG AG CGA GGT GCT TCG TTA |
| NO. 22 | |
| SEQ ID | ACACTCTTTCCCTACACGACGCTCTTCCGATCT NHNHN AGTTT AG CGA GGT GCT TCG TTA |
| NO. 23 | |
| SEQ ID | ACACTCTTTCCCTACACGACGCTCTTCCGATCT NHNHN ATACA AG CGA GGT GCT TCG TTA |
| NO. 24 | |
| SEQ ID | ACACTCTTTCCCTACACGACGCTCTTCCGATCT NHNHN TTATG AG CGA GGT GCT TCG TTA |
| NO. 25 | |
| SEQ ID | AATGATACGGCGACCACCGAGATCTACACTCTTTCCCTACACGAC |
| NO. 26 | |
| SEQ ID | CAAGCAGAAGACGGCATACGAGATAA XXXXXX GTGACTGGAGTTCAGACGTGTGCTCTTCCGATCT (XXXXXX |
| NO. 27 | denotes cell barcodes) |
| SEQ ID | CGAGGTGCTTCGTTACAGGATGATGTTTTTGTCCATGATAGCCTTGTCGTCATCGTC |
| NO. 28 | |
| SEQ ID | CGAGGTGCTTCGTTACAGTTTAACTTTGATGTTCAGCAGAGCCTTGTCGTCATCGTC |
| NO. 29 | |
| SEQ ID | CGAGGTGCTTCGTTAAACGTGCAGAGATTTGTCCATCAGAGCCTTGTCGTCATCGTC |
| NO. 30 | |
| SEQ ID | CGAGGTGCTTCGTTACAGGTAGATGTGGTGGTCAGACAGAGCCTTGTCGTCATCGTC |
| NO. 31 | |
| SEQ ID | CGAGGTGCTTCGTTATGCTGCAGGATCAGGACCCCACAGTGCCTTGTCGTCATCGTC |
| NO. 32 | |
| SEQ ID | CGAGGTGCTTCGTTAAGCTGCTGCCGGATCAGGACCCCACAGTGCCTTGTCGTCATCGTC |
| NO. 33 | |
| SEQ ID | CGAGGTGCTTCGTTACAGCGGCAGCAGACGCATCCACAGAGCCTTGTCGTCATCGTC |
| NO. 34 | |
| SEQ ID | CGAGGTGCTTCGTTAAACTTCCATCGTGTGGGTGCCCAGCATAGCCTTGTCGTCATCGTC |
| NO. 35 | |
| SEQ ID | CGAGGTGCTTCGTTAAACGGTCCAGCAAACACCATTGATGCACTTGTCGTCATCGTC |
| NO. 36 | |
| SEQ ID | CGAGGTGCTTCGTTAAACCATCGTCAGCAGACCACCCAGGCACTTGTCGTCATCGTC |
| NO. 37 | |
| SEQ ID | CGAGGTGCTTCGTTATGCAGAGGTCTGGAAACTCCACAGCAGGCACTTGTCGTCATCGTC |
| NO. 38 | |
| SEQ ID | CGAGGTGCTTCGTTAAACAGCTTCCAGCAGCAGGTGCATACACTTGTCGTCATCGTC |
| NO. 39 | |
| SEQ ID | CGAGGTGCTTCGTTACAGGTAGAATGCGTGTTCCCACATATCCTTGTCGTCATCGTC |
| NO. 40 | |
| SEQ ID | CGAGGTGCTTCGTTAAACGGTCAGGATACCGATACCAGCCAGTTCCTTGTCGTCATCGTC |
| NO. 41 | |
| SEQ ID | CGAGGTGCTTCGTTAAACCTGGCAGATGTAAGAGTCAATGAACTTGTCGTCATCGTC |
| NO. 42 | |
| SEQ ID | CGAGGTGCTTCGTTACAGGTAGAAACCAACAGCGAACAGGAACTTGTCGTCATCGTC |
| NO. 43 | |
| SEQ ID | CGAGGTGCTTCGTTACAGAGCAACAGACAGAACGATCAGGAACTTGTCGTCATCGTC |
| NO. 44 | |
| SEQ ID | CGAGGTGCTTCGTTAAACAGACGGGAAGAAGTCAGACGGCAGGAACTTGTCGTCATCGTC |
| NO. 45 | |
| SEQ ID | CGAGGTGCTTCGTTAGATCAGCATGAAAACAGACCACAGGAACTTGTCGTCATCGTC |
| NO. 46 | |
| SEQ ID | CGAGGTGCTTCGTTACAGCAGCAGAGCCAGAGCGTACAGGAACTTGTCGTCATCGTC |
| NO. 47 | |
| SEQ ID | CGAGGTGCTTCGTTAGATTTCGTAGATGAATTTGTTCATAAACTTGTCGTCATCGTC |
| NO. 48 | |
| SEQ ID | CGAGGTGCTTCGTTAGATGAAGTGGAAGTCAGAGTACATGAACTTGTCGTCATCGTC |
| NO. 49 | |
| SEQ ID | CGAGGTGCTTCGTTAAACGTCGGTAAAGAATTCACCCACAAACTTGTCGTCATCGTC |
| NO. 50 | |
| SEQ ID | CGAGGTGCTTCGTTACAGGGTGAAAACAAAACCCAGAATGCCCTTGTCGTCATCGTC |
| NO. 51 | |
| SEQ ID | CGAGGTGCTTCGTTACAGCATAGCAACCAGCGTGCACAGGCCCTTGTCGTCATCGTC |
| NO. 52 | |
| SEQ ID | CGAGGTGCTTCGTTACAGAGACGGAGCGTGGTGCAGCAGACCCTTGTCGTCATCGTC |
| NO. 53 | |
| SEQ ID | CGAGGTGCTTCGTTACAGTTCTTCTTCCAGAGACAGCAGACCCTTGTCGTCATCGTC |
| NO. 54 | |
| SEQ ID | CGAGGTGCTTCGTTACAGGAAACGGTTCAGGTTCGGAGACAGACCCTTGTCGTCATCGTC |
| NO. 55 | |
| SEQ ID | CGAGGTGCTTCGTTACAGGTGTTCCATACCGTCGTACAGACCCTTGTCGTCATCGTC |
| NO. 56 | |
| SEQ ID | CGAGGTGCTTCGTTAAACCAGGTACAGAGCTTCAACCAGGTGCTTGTCGTCATCGTC |
| NO. 57 | |
| SEQ ID | CGAGGTGCTTCGTTAAACAGACAGAACACCGTCAACAGCCAGGATCTTGTCGTCATCGTC |
| NO. 58 | |
| SEQ ID | CGAGGTGCTTCGTTAAACACCGTGCACCGGCTCTTTCAGGATCTTGTCGTCATCGTC |
| NO. 59 | |
| SEQ ID | CGAGGTGCTTCGTTACAGTTTGTGGATGTGTTCCATCAGGATCTTGTCGTCATCGTC |
| NO. 60 | |
| SEQ ID | CGAGGTGCTTCGTTAAACGTATTGCAGATCTTGACCCGGCAGGATCTTGTCGTCATCGTC |
| NO. 61 | |
| SEQ ID | CGAGGTGCTTCGTTAAACGCCTTTGGTGATGTCGGTCAGGATCTTGTCGTCATCGTC |
| NO. 62 | |
| SEQ ID | CGAGGTGCTTCGTTAAACAGAGAACGGAACCTGGTCCATGATCTTGTCGTCATCGTC |
| NO. 63 | |
| SEQ ID | CGAGGTGCTTCGTTAAACACGTTCCAGGGCTTCCAGCATGATCTTGTCGTCATCGTC |
| NO. 64 | |
| SEQ ID | CGAGGTGCTTCGTTAAACAGAAAACGGAACTTGATCGGTGATCTTGTCGTCATCGTC |
| NO. 65 | |
| SEQ ID | CGAGGTGCTTCGTTAAACAGCGTTAATACCCAGAGCAACAATTTTCTTGTCGTCATCGTC |
| NO. 66 | |
| SEQ ID | CGAGGTGCTTCGTTACAGAACAATCAGGAACACTTGCAGTTTCTTGTCGTCATCGTC |
| NO. 67 | |
| SEQ ID | CGAGGTGCTTCGTTAAGCCAGCAGGTCACCTTCAGACAGTTTCTTGTCGTCATCGTC |
| NO. 68 | |
| SEQ ID | CGAGGTGCTTCGTTAAACAGCGTTGATACCCAGAGCAACCAGTTTCTTGTCGTCATCGTC |
| NO. 69 | |
| SEQ ID | CGAGGTGCTTCGTTACACATTGTTGATACCCAGTGCAACCAGTTTCTTGTCGTCATCGTC |
| NO. 70 | |
| SEQ ID | CGAGGTGCTTCGTTACACTTGCCAATACTGACCCCAGGTTTTCTTGTCGTCATCGTC |
| NO. 71 | |
| SEQ ID | CGAGGTGCTTCGTTACAGAGCGGTAACCTGACCAGCGCACAGCAGCTTGTCGTCATCGTC |
| NO. 72 | |
| SEQ ID | CGAGGTGCTTCGTTAAACTTCGATCAGAGCCAGACCGAACAGCAGCTTGTCGTCATCGTC |
| NO. 73 | |
| SEQ ID | CGAGGTGCTTCGTTACACATAAACCGGGTAACCAAACAGCAGCTTGTCGTCATCGTC |
| NO. 74 | |
| SEQ ID | CGAGGTGCTTCGTTAAACCCAGCCACCCAGGATGTTGAACAGCAGCTTGTCGTCATCGTC |
| NO. 75 | |
| SEQ ID | CGAGGTGCTTCGTTAAACAAACATGCAGGTTGCGCCCAGCAGCTTGTCGTCATCGTC |
| NO. 76 | |
| SEQ ID | CGAGGTGCTTCGTTACAGCAGGAAAGAGGTCAGGTCGATCAGCAGCTTGTCGTCATCGTC |
| NO. 77 | |
| SEQ ID | CGAGGTGCTTCGTTACAGCCACAGAGAGAACAGAGACAGCAGCTTGTCGTCATCGTC |
| NO. 78 | |
| SEQ ID | CGAGGTGCTTCGTTAAACAGCCATCGGACCGTTCCACAGCAGCTTGTCGTCATCGTC |
| NO. 79 | |
| SEQ ID | CGAGGTGCTTCGTTAAACATTGATAGACGGGATGTTCAGCATCTTGTCGTCATCGTC |
| NO. 80 | |
| SEQ ID | CGAGGTGCTTCGTTACAGCGGCAGCAGGTGCTGGTACAGCATCTTGTCGTCATCGTC |
| NO. 81 | |
| SEQ ID | CGAGGTGCTTCGTTAAACGGTGCAACCAGATTCCCAAACCATCTTGTCGTCATCGTC |
| NO. 82 | |
| SEQ ID | CGAGGTGCTTCGTTAAACGGTAGCCAGGTCGGTCTGAGCCAGGTTCTTGTCGTCATCGTC |
| NO. 83 | |
| SEQ ID | CGAGGTGCTTCGTTAAACGGTAGCAACCATCGGAACCAGGTTCTTGTCGTCATCGTC |
| NO. 84 | |
| SEQ ID | CGAGGTGCTTCGTTAAACAACATCCATGCACGGGATCAGCTGCTTGTCGTCATCGTC |
| NO. 85 | |
| SEQ ID | CGAGGTGCTTCGTTACAGAGAGGTCAGAGCGCACAGCAGACGCTTGTCGTCATCGTC |
| NO. 86 | |
| SEQ ID | CGAGGTGCTTCGTTACAGCAGAGCCAGCAGCGGCAGCAGACGCTTGTCGTCATCGTC |
| NO. 87 | |
| SEQ ID | CGAGGTGCTTCGTTACAGGTACGGTGCGTTCGGGAACATGCGCTTGTCGTCATCGTC |
| NO. 88 | |
| SEQ ID | CGAGGTGCTTCGTTAAACCATCGTGGTGCCATATTCCATCATACGCTTGTCGTCATCGTC |
| NO. 89 | |
| SEQ ID | CGAGGTGCTTCGTTAAACCAGGTACAGAGCTTCAACCAGATGTGACTTGTCGTCATCGTC |
| NO. 90 | |
| SEQ ID | CGAGGTGCTTCGTTAAACTTCCAGCAGACGGCCAATGATAGACTTGTCGTCATCGTC |
| NO. 91 | |
| SEQ ID | CGAGGTGCTTCGTTACAGCAGTTTAACACCAGCAGCCAGAGACTTGTCGTCATCGTC |
| NO. 92 | |
| SEQ ID | CGAGGTGCTTCGTTAAGCCTGGGTGATCCACATCAGCAGAGACTTGTCGTCATCGTC |
| NO. 93 | |
| SEQ ID | CGAGGTGCTTCGTTAAACCTGGGTGATCCACATCAGCAGAGACTTGTCGTCATCGTC |
| NO. 94 | |
| SEQ ID | CGAGGTGCTTCGTTAAGCGTAGTAAACGGTGATCGGCAGAGACTTGTCGTCATCGTC |
| NO. 95 | |
| SEQ ID | CGAGGTGCTTCGTTACAGTTCAGCCTGCAGCGGAGACAGAGACTTGTCGTCATCGTC |
| NO. 96 | |
| SEQ ID | CGAGGTGCTTCGTTAAACAGCGTTGATACCCAGAGCAACCAGAGACTTGTCGTCATCGTC |
| NO. 97 | |
| SEQ ID | CGAGGTGCTTCGTTACAGGTTAACTTCGTAAACGTGGTACAGAGACTTGTCGTCATCGTC |
| NO. 98 | |
| SEQ ID | CGAGGTGCTTCGTTACAGGGTAGCCACGGTGTTATACAGAGACTTGTCGTCATCGTC |
| NO. 99 | |
| SEQ ID | CGAGGTGCTTCGTTAAACGCCAACTTCAAAAACACGGTACATAGACTTGTCGTCATCGTC |
| NO. 100 | |
| SEQ ID | CGAGGTGCTTCGTTAAACACCCGTAATGGTACTAGCAACAGACTTGTCGTCATCGTC |
| NO. 101 | |
| SEQ ID | CGAGGTGCTTCGTTAAACAGGCATCGGAGACGGTTTTGACAGGGTCTTGTCGTCATCGTC |
| NO. 102 | |
| SEQ ID | CGAGGTGCTTCGTTAAACGGTCAGAACAATGTTAGCAGCAACCTTGTCGTCATCGTC |
| NO. 103 | |
| SEQ ID | CGAGGTGCTTCGTTAAACCAGCGGGGTCAGCATAACAATAACCTTGTCGTCATCGTC |
| NO. 104 | |
| SEQ ID | CGAGGTGCTTCGTTACAGCATAACAGAGGTTTCTTCCAGAACCTTGTCGTCATCGTC |
| NO. 105 | |
| SEQ ID | CGAGGTGCTTCGTTAGATAGCGAAACCCAGACCGAACAGAACCTTGTCGTCATCGTC |
| NO. 106 | |
| SEQ ID | CGAGGTGCTTCGTTATGCTTCCAGCAGGTCGTCGTGCAGAACCTTGTCGTCATCGTC |
| NO. 107 | |
| SEQ ID | CGAGGTGCTTCGTTATTCAACACCCGGAACACCACCCATCAGAACCTTGTCGTCATCGTC |
| NO. 108 | |
| SEQ ID | CGAGGTGCTTCGTTAAACAGCCAGAGAAGAAACAATAATCATAACCTTGTCGTCATCGTC |
| NO. 109 | |
| SEQ ID | CGAGGTGCTTCGTTAAACCACGTATTGCAGCAGGATGTTCATAACCTTGTCGTCATCGTC |
| NO. 110 | |
| SEQ ID | CGAGGTGCTTCGTTAGAGGTACACCAGAACACCAGTAACAACCTTGTCGTCATCGTC |
| NO. 111 | |
| SEQ ID | CGAGGTGCTTCGTTACAGGGTTGAAGTGCCCGGCAGTAACCACTTGTCGTCATCGTC |
| NO. 112 | |
| SEQ ID | CGAGGTGCTTCGTTAAACAGTAGAAGTACCCGGCAGTAACCACTTGTCGTCATCGTC |
| NO. 113 | |
| SEQ ID | CGAGGTGCTTCGTTAAACAAACGGAACCAGCAGAGACAGCCACTTGTCGTCATCGTC |
| NO. 114 | |
| SEQ ID | CGAGGTGCTTCGTTAAGCGGTAACCGGACCAGGTTCCAGGTACTTGTCGTCATCGTC |
| NO. 115 | |
| SEQ ID | CGAGGTGCTTCGTTAGATGTGCACGATAGCCGGTAACAGGTACTTGTCGTCATCGTC |
| NO. 116 | |
| SEQ ID | CGAGGTGCTTCGTTACAGACGCGGACCACGACGAGGCAGCAGGTACTTGTCGTCATCGTC |
| NO. 117 | |
| SEQ ID | CGAGGTGCTTCGTTACAGGGTCCACCAGTTCTGCTGCAGGTACTTGTCGTCATCGTC |
| NO. 118 | |
| SEQ ID | CGAGGTGCTTCGTTAAACAGCGTTGATACCCAGAGCAACCAGGTACTTGTCGTCATCGTC |
| NO. 119 | |
| SEQ ID | CGAGGTGCTTCGTTAAACAGCGTTAACACCCAGAGCAACCAGGTACTTGTCGTCATCGTC |
| NO. 120 | |
| SEQ ID | CGAGGTGCTTCGTTAAACCTGAGACATGGTGCCATCCATATACTTGTCGTCATCGTC |
| NO. 121 | |
| SEQ ID | CGAGGTGCTTCGTTAGGTGGTTTCCGGCTGCAGGTCCAGCATGTACTTGTCGTCATCGTC |
| NO. 122 | |
| SEQ ID | CGAGGTGCTTCGTTAAACAACAATCAGGTGGTCCAGAACATACTTGTCGTCATCGTC |
| NO. 123 | |
| SEQ ID | CGAGGTGCTTCGTTAAACAGAAACATCCAGGTAGATCAGGAACTTGTCGTCATCGTC |
| NO. 124 | |
| SEQ ID | CGAGGTGCTTCGTTACAGGTGCAGGTCAAAGTCCGGCATGAACTTGTCGTCATCGTC |
| NO. 125 | |
| SEQ ID | CGAGGTGCTTCGTTAAACACCGAACAGTTTAACACCCAGCAGAACCTTGTCGTCATCGTC |
| NO. 126 | |
| SEQ ID | CGAGGTGCTTCGTTACAGGTAGGTGTTGTGGTGGATCAGAGCCTTGTCGTCATCGTC |
| NO. 127 | |
| SEQ ID | CGAGGTGCTTCGTTAAACCAGGAAGATGGTGAAGTTTTCCAGAACCTTGTCGTCATCGTC |
| NO. 128 | |
| SEQ ID | CGAGGTGCTTCGTTACAGGAAGATGGTGAAGTTTTCCAGAACAGACTTGTCGTCATCGTC |
| NO. 129 | |
| SEQ ID | CGAGGTGCTTCGTTAAACTTCGTAGTTCAGGCCGGTCAGGATCTTGTCGTCATCGTC |
| NO. 130 | |
| SEQ ID | CGAGGTGCTTCGTTACAGAACCGGAACAAAACCGTACAGAGCCTTGTCGTCATCGTC |
| NO. 131 | |
| SEQ ID | CGAGGTGCTTCGTTAAACCGGCGGAGCCCAAGACATAACAACCTTGTCGTCATCGTC |
| NO. 132 | |
| SEQ ID | CGAGGTGCTTCGTTACAGCAGCAGAGACGGGGTTTCCAGCAGAGCCTTGTCGTCATCGTC |
| NO. 133 | |
| SEQ ID | CGAGGTGCTTCGTTAGATGTGCGGGATAACCGGAGACAGAGCCTTGTCGTCATCGTC |
| NO. 134 | |
| SEQ ID | CGAGGTGCTTCGTTAAACACCGTAAACCAGGAATTCAAACAGTTTCTTGTCGTCATCGTC |
| NO. 135 | |
| SEQ ID | CGAGGTGCTTCGTTAAACCGGAACAGAGCAGCAATTCAGGTTCTTGTCGTCATCGTC |
| NO. 136 | |
| SEQ ID | CGAGGTGCTTCGTTAGATCAGGTGGATGAACGGGATAATCAGCTTGTCGTCATCGTC |
| NO. 137 | |
| SEQ ID | CGAGGTGCTTCGTTACAGACACGGCGGCATACCAAACAGCAGCTTGTCGTCATCGTC |
| NO. 138 | |
| SEQ ID | CGAGGTGCTTCGTTACAGCAGAACCAGTTGATGAGACAGTTTCTTGTCGTCATCGTC |
| NO. 139 | |
| SEQ ID | CGAGGTGCTTCGTTAAACAGAGTAAACGTAAGAACCAACAGCCTTGTCGTCATCGTC |
| NO. 140 | |
| SEQ ID | CGAGGTGCTTCGTTAAACACGGGTCAGCAGGTTATACAGGAACTTGTCGTCATCGTC |
| NO. 141 | |
| SEQ ID | CGAGGTGCTTCGTTACAGTTTCTGCTGGATGTTCATCAGTTTCTTGTCGTCATCGTC |
| NO. 142 | |
| SEQ ID | CGAGGTGCTTCGTTACAGCGGAAACAGTTGTTCACCCAGCATCTTGTCGTCATCGTC |
| NO. 143 | |
| SEQ ID | CGAGGTGCTTCGTTAAACAGAAACGTCCAGGTAGGTCAGGAACTTGTCGTCATCGTC |
| NO. 144 | |
| SEQ ID | CGAGGTGCTTCGTTACAGGTGCAGGTCGAAGTCCGGCATAGACTTGTCGTCATCGTC |
| NO. 145 | |
| SEQ ID | CGAGGTGCTTCGTTACACACCAGACAGTTTCACACCCAGCAGAACCTTGTCGTCATCGTC |
| NO. 146 | |
| SEQ ID | CGAGGTGCTTCGTTACAGGTGGGTGTTGTGGTGGATCAGAGCCTTGTCGTCATCGTC |
| NO. 147 | |
| SEQ ID | CGAGGTGCTTCGTTAAACCAGCAGGATGGTGAAGTTTTCCAGAACCTTGTCGTCATCGTC |
| NO. 148 | |
| SEQ ID | CGAGGTGCTTCGTTACAGCAGGATGGTGAAGTTTTCCAGAACAGACTTGTCGTCATCGTC |
| NO. 149 | |
| SEQ ID | CGAGGTGCTTCGTTATGCTTCGTAGTTCAGACCAGTCAGGATCTTGTCGTCATCGTC |
| NO. 150 | |
| SEQ ID | CGAGGTGCTTCGTTACAGAACCGGAACAGAACCGTACAGAGCCTTGTCGTCATCGTC |
| NO. 151 | |
| SEQ ID | CGAGGTGCTTCGTTAAACCGGCGGAGCCCAAGACAGAACAACCTTGTCGTCATCGTC |
| NO. 152 | |
| SEQ ID | CGAGGTGCTTCGTTACAGCAGCAGAGACAGGGTTTCCAGCAGAGCCTTGTCGTCATCGTC |
| NO. 153 | |
| SEQ ID | CGAGGTGCTTCGTTAGATCAGCGGGATAACCGGAGACAGAGCCTTGTCGTCATCGTC |
| NO. 154 | |
| SEQ ID | CGAGGTGCTTCGTTACACACCGTGAACCAGGAACTCGAACAGTTTCTTGTCGTCATCGTC |
| NO. 155 | |
| SEQ ID | CGAGGTGCTTCGTTAAACCGGAACAGAGCAACGGTTCAGGTTCTTGTCGTCATCGTC |
| NO. 156 | |
| SEQ ID | CGAGGTGCTTCGTTAGATCAGGTGGATGCACGGGATAATCAGCTTGTCGTCATCGTC |
| NO. 157 | |
| SEQ ID | CGAGGTGCTTCGTTACAGGCACGGGGTCATACCGAACAGCAGCTTGTCGTCATCGTC |
| NO. 158 | |
| SEQ ID | CGAGGTGCTTCGTTACAGCAGAACCGGCTGGTGAGACAGTTTCTTGTCGTCATCGTC |
| NO. 159 | |
| SEQ ID | CGAGGTGCTTCGTTAAACAGAGTAAACGTGAGAACCAACAGCCTTGTCGTCATCGTC |
| NO. 160 | |
| SEQ ID | CGAGGTGCTTCGTTAAACACGGGTCAGCGGGTTATACAGGAACTTGTCGTCATCGTC |
| NO. 161 | |
| SEQ ID | CGAGGTGCTTCGTTACAGTTGCTGCTGGATGTTCATCAGTTTCTTGTCGTCATCGTC |
| NO. 162 | |
| SEQ ID | CGAGGTGCTTCGTTACAGCGGGAACAGACGTTCACCCAGCATCTTGTCGTCATCGTC |
| NO. 163 | |
| SEQ ID | CGAGGTGCTTCGTTACAGGAAGTGAACCAGTTCAGCAACTTTCTTGTCGTCATCGTC |
| NO. 164 | |
| SEQ ID | CGAGGTGCTTCGTTACAGGAAGTGAACCAGTTCAGCCATTTTCTTGTCGTCATCGTC |
| NO. 165 | |
| SEQ ID | CGAGGTGCTTCGTTACAGGAAGTGAACCAGTTCAACCATTTTCTTGTCGTCATCGTC |
| NO. 166 | |
| SEQ ID | CGAGGTGCTTCGTTACAGGAAGTGAACCAGTTTAGCAACTTTCTTGTCGTCATCGTC |
| NO. 167 | |
| SEQ ID | CGAGGTGCTTCGTTAGGTGAAACGCACAAATGCAAACAGGCGCTTGTCGTCATCGTC |
| NO. 168 | |
| SEQ ID | CGAGGTGCTTCGTTAGGTGTTACGGATCAGTTCATCCAGGTACTTGTCGTCATCGTC |
| NO. 169 | |
| SEQ ID | CGAGGTGCTTCGTTAAACTTCGTTACCACGGAATTGCAGGAACTTGTCGTCATCGTC |
| NO. 170 | |
| SEQ ID | CGAGGTGCTTCGTTAAACTTTTTCTTCAATATCGGTCAGGATCTTGTCGTCATCGTC |
| NO. 171 | |
| SEQ ID | CGAGGTGCTTCGTTACAGGTGCAGGTCAAAATCCGGCATGAACTTGTCGTCATCGTC |
| NO. 172 | |
| SEQ ID | CGAGGTGCTTCGTTACAGCTTCTGTTGGATGTTCATCAGTTTCTTGTCGTCATCGTC |
| NO. 173 | |
| SEQ ID | CGAGGTGCTTCGTTAAACAGGTTTGTCAACCGGAAACATACCCTTGTCGTCATCGTC |
| NO. 174 | |
| SEQ ID | CGAGGTGCTTCGTTAAACCGGAAACATACCCAGATACTGAACCTTGTCGTCATCGTC |
| NO. 175 | |
| SEQ ID | CGAGGTGCTTCGTTACAGTTCATATTCCACATGCGGTAACCACTTGTCGTCATCGTC |
| NO. 176 | |
| SEQ ID | CGAGGTGCTTCGTTAAACGTGCAACGGAGATGCCCACAGTTTCTTGTCGTCATCGTC |
| NO. 177 | |
| SEQ ID | CGAGGTGCTTCGTTACAGGGTGAAGATGTCCACATTCAGGATCTTGTCGTCATCGTC |
| NO. 178 | |
| SEQ ID | CGAGGTGCTTCGTTACAGGTGGGTAATGAAAACGTAAACAAACTTGTCGTCATCGTC |
| NO. 179 | |
| SEQ ID | CGAGGTGCTTCGTTAAATACGTGCCTGGGTCAGCAGCATGAACTTGTCGTCATCGTC |
| NO. 180 | |
| SEQ ID | CGAGGTGCTTCGTTACACACGTACTAAGGCCAGAATTGACAGCATCTTGTCGTCATCGTC |
| NO. 181 | |
| SEQ ID | CGAGGTGCTTCGTTAAACTTCTGCCGGGGTGTAAGACAGAGCCTTGTCGTCATCGTC |
| NO. 182 | |
| SEQ ID | CGAGGTGCTTCGTTAGATCAGACCCAGGTCACCGTCCATCAGATGCTTGTCGTCATCGTC |
| NO. 183 | |
| SEQ ID | CGAGGTGCTTCGTTACAGACCCAGGTCACCGTCCATCAGATGCTTGTCGTCATCGTC |
| NO. 184 | |
| SEQ ID | CGAGGTGCTTCGTTACAGAGACGGAGAATGCGGAACCATCAGCTTGTCGTCATCGTC |
| NO. 185 | |
| SEQ ID | CGAGGTGCTTCGTTATGCGTTCAGAATTTGCTCAAACAGTTTCTTGTCGTCATCGTC |
| NO. 186 | |
| SEQ ID | CGAGGTGCTTCGTTACAGTTTGGTGTGCAGGGTCAGCATGTACTTGTCGTCATCGTC |
| NO. 187 | |
| SEQ ID | CGAGGTGCTTCGTTAAATCGCAATGAAAAAAGAGGTCAGACCCTTGTCGTCATCGTC |
| NO. 188 | |
| SEQ ID | CGAGGTGCTTCGTTAAACCAGGTACAGGTGGTCAGACAGAAACTTGTCGTCATCGTC |
| NO. 189 | |
| SEQ ID | CGAGGTGCTTCGTTACAGACCAGAGAAGATAGCCAGCAGGTACTTGTCGTCATCGTC |
| NO. 190 | |
| SEQ ID | CGAGGTGCTTCGTTAAACAACTGCGGTGATGGTGTTCAGTTTCTTGTCGTCATCGTC |
| NO. 191 | |
| SEQ ID | CGAGGTGCTTCGTTACAGACCGTGAGCGTCGTCCACCAGCATCTTGTCGTCATCGTC |
| NO. 192 | |
| SEQ ID | CGAGGTGCTTCGTTATGCAACAATAACAGCCAGCATCAGCATCTTGTCGTCATCGTC |
| NO. 193 | |
| SEQ ID | CGAGGTGCTTCGTTACACAACCGCCAGCGTACCTGCTAACAGCTTGTCGTCATCGTC |
| NO. 194 | |
| SEQ ID | CGAGGTGCTTCGTTAAACACGAGGAGACAGCGGAGCCAGAGACTTGTCGTCATCGTC |
| NO. 195 | |
| SEQ ID | CGAGGTGCTTCGTTAAACGCCGAACAGTTTCACACCCAGCAGAACCTTGTCGTCATCGTC |
| NO. 196 | |
| SEQ ID | CGAGGTGCTTCGTTAAACCGTACCAACCATCGTAAACAGCGTCTTGTCGTCATCGTC |
| NO. 197 | |
| SEQ ID | CGAGGTGCTTCGTTAAACATTCGGCACGGTCATAGCCAGCAGCTTGTCGTCATCGTC |
| NO. 198 | |
| SEQ ID | CGAGGTGCTTCGTTACACATTCGGAACTTTAATTGCCAGTAACTTGTCGTCATCGTC |
| NO. 199 | |
| SEQ ID | CGAGGTGCTTCGTTAAACTTCCAGGTCGTTGATTTTGGTCATAAACTTGTCGTCATCGTC |
| NO. 200 | |
| SEQ ID | CGAGGTGCTTCGTTACAGAACAGACAGCAGATCGTTCAGGAACTTGTCGTCATCGTC |
| NO. 201 | |
| SEQ ID | CGAGGTGCTTCGTTAAATGAACCATGCAATAACCATCAGACCCTTGTCGTCATCGTC |
| NO. 202 | |
| SEQ ID | CGAGGTGCTTCGTTAAACAGCAACAACATAAGAAAAGATGAACTTGTCGTCATCGTC |
| NO. 203 | |
| SEQ ID | CGAGGTGCTTCGTTACAGATAGGTGTTGTGGTGGATCAGAGCCTTGTCGTCATCGTC |
| NO. 204 | |
| SEQ ID | CGAGGTGCTTCGTTAGATATTAGCAGCCCAGTCCAGCAGAATCTTGTCGTCATCGTC |
| NO. 205 | |
| SEQ ID | CGAGGTGCTTCGTTAAACCGGAGACAGTTCAGAGAACAGACTCTTGTCGTCATCGTC |
| NO. 206 | |
| SEQ ID | CGAGGTGCTTCGTTACAGTTCGGTGTAGTATTCCAGAACAGACTTGTCGTCATCGTC |
| NO. 207 | |
| SEQ ID | CGAGGTGCTTCGTTAAACTTCAAACAGAGATTTCGCAATATGCTTGTCGTCATCGTC |
| NO. 208 | |
| SEQ ID | CGAGGTGCTTCGTTAAACCGGCGGAGCCCAACTCATAACAACCTTGTCGTCATCGTC |
| NO. 209 | |
| SEQ ID | CGAGGTGCTTCGTTAAACGGTCACAAAAATATCCATTGCGGTCTTGTCGTCATCGTC |
| NO. 210 | |
| SEQ ID | CGAGGTGCTTCGTTAAACAAAAATGTCCATAGCGGTAACATACTTGTCGTCATCGTC |
| NO. 211 | |
| SEQ ID | CGAGGTGCTTCGTTATGCGCCAACAATCCAGGTCAGAACGTACTTGTCGTCATCGTC |
| NO. 212 | |
| SEQ ID | CGAGGTGCTTCGTTACAGAACCGGAACAAAACCATACAGTGCCTTGTCGTCATCGTC |
| NO. 213 | |
| SEQ ID | CGAGGTGCTTCGTTACAGTAACAGAGACGGGGTTTCCAGCAGTGCCTTGTCGTCATCGTC |
| NO. 214 | |
| SEQ ID | CGAGGTGCTTCGTTACAGCAGAGACGGGGTTTCCAGCAGTGCCTTGTCGTCATCGTC |
| NO. 215 | |
| SEQ ID | CGAGGTGCTTCGTTAGATCCAGTACAGCATATTGAAGATCAGCTTGTCGTCATCGTC |
| NO. 216 | |
| SEQ ID | CGAGGTGCTTCGTTAAACCGGAGAGGTGGTCAGGTCCAGAGACTTGTCGTCATCGTC |
| NO. 217 | |
| SEQ ID | CGAGGTGCTTCGTTACAGGTAGATGTTAGCCAGCGGCATTTTCTTGTCGTCATCGTC |
| NO. 218 | |
| SEQ ID | CGAGGTGCTTCGTTAAACCAGGAAGTCCAGAGAGAAAGAGAACTTGTCGTCATCGTC |
| NO. 219 | |
| SEQ ID | CGAGGTGCTTCGTTACAGCTTCACGGTGTACTTTTGCAGAAACTTGTCGTCATCGTC |
| NO. 220 | |
| SEQ ID | CGAGGTGCTTCGTTAGATTTTTGCGATCATAGCGTTCAGGATCTTGTCGTCATCGTC |
| NO. 221 | |
| SEQ ID | CGAGGTGCTTCGTTAGATGTAGGTGTGCAGTTCAGACAGTTTCTTGTCGTCATCGTC |
| NO. 222 | |
| SEQ ID | CGAGGTGCTTCGTTAAACGCTAACAGACAGTAACAGCAGAGACTTGTCGTCATCGTC |
| NO. 223 | |
| SEQ ID | CGAGGTGCTTCGTTACAGGGTCACGGTCAGTTCGGCCATATACTTGTCGTCATCGTC |
| NO. 224 | |
| SEQ ID | CGAGGTGCTTCGTTACAGTTCACCCGGAGAGTCATACATATACTTGTCGTCATCGTC |
| NO. 225 | |
| SEQ ID | CGAGGTGCTTCGTTAAACAATGTAAACAATAGAGAACGGCATCATCTTGTCGTCATCGTC |
| NO. 226 | |
| SEQ ID | CGAGGTGCTTCGTTAAATGTAAACAATAGAGAACGGCATCATCTTGTCGTCATCGTC |
| NO. 227 | |
| SEQ ID | CGAGGTGCTTCGTTAGATGTAAACAATAGAGAACGGCATCATCAGCTTGTCGTCATCGTC |
| NO. 228 | |
| SEQ ID | CGAGGTGCTTCGTTACAGGTAGAACAGGTGAGAGAAACTCATGGTCTTGTCGTCATCGTC |
| NO. 229 | |
| SEQ ID | CGAGGTGCTTCGTTACAGCAGGATAGAAATGCCCATAATGAACTTGTCGTCATCGTC |
| NO. 230 | |
| SEQ ID | CGAGGTGCTTCGTTAAACCAGGAATGCACGGTGAAACAGAACCTTGTCGTCATCGTC |
| NO. 231 | |
| SEQ ID | CGAGGTGCTTCGTTAAACCAGGTTCAGAACATCAGAAGAAAACTTGTCGTCATCGTC |
| NO. 232 | |
| SEQ ID | CGAGGTGCTTCGTTACAGAAACTCCAGATACGGAACCAGACGCTTGTCGTCATCGTC |
| NO. 233 | |
| SEQ ID | CGAGGTGCTTCGTTAAACCGGCTTGATCTCACGAGACAGTTTCTTGTCGTCATCGTC |
| NO. 234 | |
| SEQ ID | CGAGGTGCTTCGTTAAACATAGTAGGTTAAGATTGCCAGCAGCTTGTCGTCATCGTC |
| NO. 235 | |
| SEQ ID | CGAGGTGCTTCGTTAAGCGTTCACGTTCAGATCCGGCAGAAACTTGTCGTCATCGTC |
| NO. 236 | |
| SEQ ID | CGAGGTGCTTCGTTAGATCGGAGACAGGATTTCAGAGGTGTACTTGTCGTCATCGTC |
| NO. 237 | |
| SEQ ID | CGAGGTGCTTCGTTACAGAGCCAGATAGCGATTAAACAGGTTCTTGTCGTCATCGTC |
| NO. 238 | |
| SEQ ID | CGAGGTGCTTCGTTACAGCAGCCAGGTAACTGATGCGATCAGCAGCTTGTCGTCATCGTC |
| NO. 239 | |
| SEQ ID | CGAGGTGCTTCGTTACAGCCAGGTAACAGATGCGATCAGCAGCTTGTCGTCATCGTC |
| NO. 240 | |
| SEQ ID | CGAGGTGCTTCGTTAAACGCCTTCCATAAATTCGTCCAGGAACTTGTCGTCATCGTC |
| NO. 241 | |
| SEQ ID | CGAGGTGCTTCGTTAGATATGCGGGATAACCGGAGACAGAGCCTTGTCGTCATCGTC |
| NO. 242 | |
| SEQ ID | CGAGGTGCTTCGTTAAGCCAGTTGAACCGGAGGCCATAAATACTTGTCGTCATCGTC |
| NO. 243 | |
| SEQ ID | CGAGGTGCTTCGTTAAACAACACGTAACGGCTCCCATAACCACTTGTCGTCATCGTC |
| NO. 244 | |
| SEQ ID | CGAGGTGCTTCGTTACAGCAGACACGGCGGCATACCAAACAGCAGCTTGTCGTCATCGTC |
| NO. 245 | |
| SEQ ID | CGAGGTGCTTCGTTACAGACACGGCGGCATACCGAACAGCAGCTTGTCGTCATCGTC |
| NO. 246 | |
| SEQ ID | CGAGGTGCTTCGTTACAGTTTCGCAATGGTTTCATTCAGACCCTTGTCGTCATCGTC |
| NO. 247 | |
| SEQ ID | CGAGGTGCTTCGTTAAACAGGCGGCGGCATACCAATAACCAGCTTGTCGTCATCGTC |
| NO. 248 | |
| SEQ ID | CGAGGTGCTTCGTTAAACTTCCGGGCCTTTTTCGTCCAGCAGCTTGTCGTCATCGTC |
| NO. 249 | |
| SEQ ID | CGAGGTGCTTCGTTAGATAGAAGAGTAATACTGATAAATGAACTTGTCGTCATCGTC |
| NO. 250 | |
| SEQ ID | CGAGGTGCTTCGTTAAACTTCGTAGTTCAGACCCGTCAGAATCTTGTCGTCATCGTC |
| NO. 251 | |
| SEQ ID | CGAGGTGCTTCGTTACAGGGTCGGGTCAGCAGGATTCAGAATCTTGTCGTCATCGTC |
| NO. 252 | |
| SEQ ID | CGAGGTGCTTCGTTACAGGAAAGGGAACATAACAATCAGGATCTTGTCGTCATCGTC |
| NO. 253 | |
| SEQ ID | CGAGGTGCTTCGTTACATCAGGGTCAGCAGGTACAGCATGAACTTGTCGTCATCGTC |
| NO. 254 | |
| SEQ ID | CGAGGTGCTTCGTTAAACCATAACCAGGTACATGAACAGGAACTTGTCGTCATCGTC |
| NO. 255 | |
| SEQ ID | CGAGGTGCTTCGTTACAGCAGCGGGAACAGAACATTCAGGAACTTGTCGTCATCGTC |
| NO. 256 | |
| SEQ ID | CGAGGTGCTTCGTTACAGTGCCAGGTTTTCCAGAAAGATATACTTGTCGTCATCGTC |
| NO. 257 | |
| SEQ ID | CGAGGTGCTTCGTTAGGTATTATAGAACACAGCAACCATTTTCTTGTCGTCATCGTC |
| NO. 258 | |
| SEQ ID | CGAGGTGCTTCGTTACAGCATGTAGATAAACGGATTCAGAACCTTGTCGTCATCGTC |
| NO. 259 | |
| SEQ ID | CGAGGTGCTTCGTTAAACAAACACAACCAGTTCGTTCAGATACTTGTCGTCATCGTC |
| NO. 260 | |
| SEQ ID | CGAGGTGCTTCGTTAAACAACGGTCACGGTGTAGATTTCCAGGAACTTGTCGTCATCGTC |
| NO. 261 | |
| SEQ ID | CGAGGTGCTTCGTTAAACGGTCACGGTATAGATTTCCAGGAACTTGTCGTCATCGTC |
| NO. 262 | |
| SEQ ID | CGAGGTGCTTCGTTAGATGAATGCGAAAAAGGTGAACAGGAACTTGTCGTCATCGTC |
| NO. 263 | |
| SEQ ID | CGAGGTGCTTCGTTAGATAGCCAGCAGATAGCAGTCAATGAACTTGTCGTCATCGTC |
| NO. 264 | |
| SEQ ID | CGAGGTGCTTCGTTAAACGTGCGGAGAACCTTGCAGCAGAGACTTGTCGTCATCGTC |
| NO. 265 | |
| SEQ ID | CGAGGTGCTTCGTTACAGCGGGAACAGTTGTTCACCCAGCATCTTGTCGTCATCGTC |
| NO. 266 | |
| SEQ ID | CGAGGTGCTTCGTTAAACAAACAGCAGAACCAGGAACAGGAACTTGTCGTCATCGTC |
| NO. 267 | |
| SEQ ID | CGAGGTGCTTCGTTAAACGCCCATAACCAGCGGAAAAACCAGCTTGTCGTCATCGTC |
| NO. 268 | |
| SEQ ID | CGAGGTGCTTCGTTACAGCGGAAAAACCAGATCATGCAGACGCTTGTCGTCATCGTC |
| NO. 269 | |
| SEQ ID | CGAGGTGCTTCGTTAAACAGAGTAAACATAAGAACCAACAGCCTTGTCGTCATCGTC |
| NO. 270 | |
| SEQ ID | CGAGGTGCTTCGTTATGCCGGAAAGAAGATAATGCTCAGCAGCTTGTCGTCATCGTC |
| NO. 271 | |
| SEQ ID | CGAGGTGCTTCGTTACATGAAATGAGAGAAAACGGTCAGGAACTTGTCGTCATCGTC |
| NO. 272 | |
| SEQ ID | CGAGGTGCTTCGTTATGCAGATGAGAATGCAGCGAACAGTAACTTGTCGTCATCGTC |
| NO. 273 | |
| SEQ ID | CGAGGTGCTTCGTTACAGACCCCACAGAGAAACCAGTAATTGCTTGTCGTCATCGTC |
| NO. 274 | |
| SEQ ID | CGAGGTGCTTCGTTAAACTTCCACAACCACACCCAGTTGATGCTTGTCGTCATCGTC |
| NO. 275 | |
| SEQ ID | CGAGGTGCTTCGTTAAACACGTTGAACGGCATCCAGAATAAACTTGTCGTCATCGTC |
| NO. 276 | |
| SEQ ID | CGAGGTGCTTCGTTACAGAGAGTTATGATATTCAGACAGTTTCTTGTCGTCATCGTC |
| NO. 277 | |
| SEQ ID | CGAGGTGCTTCGTTAAATGAATTTGAAGTTCTGGTCTGCTAACAGCTTGTCGTCATCGTC |
| NO. 278 | |
| SEQ ID | CGAGGTGCTTCGTTACAGGTACGGTTTGAAATAATTCAGAACCTTGTCGTCATCGTC |
| NO. 279 | |
| SEQ ID | CGAGGTGCTTCGTTAAATAGAAGAAATTGCGCCAACCAGAGCCTTGTCGTCATCGTC |
| NO. 280 | |
| SEQ ID | CGAGGTGCTTCGTTAAACACGGGTCAGCAGGTTATACAGAAACTTGTCGTCATCGTC |
| NO. 281 | |
| SEQ ID | CGAGGTGCTTCGTTAAACCGGGGTACTGATTTCAACAATGTGCTTGTCGTCATCGTC |
| NO. 282 | |
| SEQ ID | CGAGGTGCTTCGTTAAACAATTTCAACACCAGCCAGCAGTTTCTTGTCGTCATCGTC |
| NO. 283 | |
| SEQ ID | CGAGGTGCTTCGTTAAACGGTGTGGACAACCTGTTCGCCCAGAATCTTGTCGTCATCGTC |
| NO. 284 | |
| SEQ ID | CGAGGTGCTTCGTTACAGAAAAACCAGTGAACCCGCCATTGCCTTGTCGTCATCGTC |
| NO. 285 | |
| SEQ ID | CGAGGTGCTTCGTTAAGCTGCAATGATGGTGGTCGGCATGTACTTGTCGTCATCGTC |
| NO. 286 | |
| SEQ ID | CGAGGTGCTTCGTTACATACCAAAAATCTGTGCAACCAGGATCTTGTCGTCATCGTC |
| NO. 287 | |
| SEQ ID | CGAGGTGCTTCGTTACAGACCCAGAACTTGCGTAATCAGAATCTTGTCGTCATCGTC |
| NO. 288 | |
| SEQ ID | CGAGGTGCTTCGTTACAGACCCAGGAACAGAGCAGCCAGGATACGCTTGTCGTCATCGTC |
| NO. 289 | |
| SEQ ID | CGAGGTGCTTCGTTACAGCAGAACCGTCCAAGAACCCAGCAGCTTGTCGTCATCGTC |
| NO. 290 | |
| SEQ ID | CGAGGTGCTTCGTTAAACGCCGTAAACCAGGAACTCAAACAGTTTCTTGTCGTCATCGTC |
| NO. 291 | |
| SEQ ID | CGAGGTGCTTCGTTAGGTGTACGGCAGCGGGTTAGCCAGTTTCTTGTCGTCATCGTC |
| NO. 292 | |
| SEQ ID | CGAGGTGCTTCGTTACAGCAGAACCAGTTGGTGAGACAGTTTCTTGTCGTCATCGTC |
| NO. 293 | |
| SEQ ID | CGAGGTGCTTCGTTACAGACCGATTGCTTCGTCCAGCAGGAACTTGTCGTCATCGTC |
| NO. 294 | |
| SEQ ID | CGAGGTGCTTCGTTAGGTGGTAGCCATAGAATCTTGCAGATACTTGTCGTCATCGTC |
| NO. 295 | |
| SEQ ID | CGAGGTGCTTCGTTACAGGAAAGAAGAGATAGATGCCATCAGGAACTTGTCGTCATCGTC |
| NO. 296 | |
| SEQ ID | CGAGGTGCTTCGTTAGAAAGAAGAGATAGATGCCATCAGGAACTTGTCGTCATCGTC |
| NO. 297 | |
| SEQ ID | CGAGGTGCTTCGTTACAGAAAACTTGAAATAGATGCCATCAGCTTGTCGTCATCGTC |
| NO. 298 | |
| SEQ ID | CGAGGTGCTTCGTTATGCCGAGAAATGCAGAGCGAACAGCAGCTTGTCGTCATCGTC |
| NO. 299 | |
| SEQ ID | CGAGGTGCTTCGTTAAATACCCGGATAATGCTTAATCAGACGCTTGTCGTCATCGTC |
| NO. 300 | |
| SEQ ID | CGAGGTGCTTCGTTACAGAACACCAGAATAGCTGCTCATAAACTTGTCGTCATCGTC |
| NO. 301 | |
| SEQ ID | CGAGGTGCTTCGTTAAACCATTGCCAGCAGCGGACCCATACCCTTGTCGTCATCGTC |
| NO. 302 | |
| SEQ ID | CGAGGTGCTTCGTTACAGAAAGATGGTGAAGTTTTCCAGAACAGACTTGTCGTCATCGTC |
| NO. 303 | |
| SEQ ID | CGAGGTGCTTCGTTAAACCAGAAAGATGGTGAAGTTTTCCAGAACCTTGTCGTCATCGTC |
| NO. 304 | |
| SEQ ID | CGAGGTGCTTCGTTACATATTGGTTTCCAGGGTCATCAGAAACTTGTCGTCATCGTC |
| NO. 305 | |
| SEQ ID | CGAGGTGCTTCGTTAAACAACATAGAAAGAAACTGCAAACGTAACCTTGTCGTCATCGTC |
| NO. 306 | |
| SEQ ID | CGAGGTGCTTCGTTACAGCAGTAAGGTAACTTGCAGTAATGCCTTGTCGTCATCGTC |
| NO. 307 | |
| SEQ ID | CGAGGTGCTTCGTTAAACAGATGCAGCGTGTTCAGAGGTGTACTTGTCGTCATCGTC |
| NO. 308 | |
| SEQ ID | CGAGGTGCTTCGTTAGGTTTCCAGGAAGGTTTCAGCCAGAGACTTGTCGTCATCGTC |
| NO. 309 | |
| SEQ ID | CGAGGTGCTTCGTTAAACGGTGTTAGAGATAGCTGCCATCGTCTTGTCGTCATCGTC |
| NO. 310 | |
| SEQ ID | CGAGGTGCTTCGTTACAGCGGAACAGACGGAGATGCCAGAAACTTGTCGTCATCGTC |
| NO. 311 | |
| SEQ ID | CGAGGTGCTTCGTTAAACAGACGGAGATGCCAGGAACATATACTTGTCGTCATCGTC |
| NO. 312 | |
| SEQ ID | CGAGGTGCTTCGTTACAGAGACACATCATGTTTCAGCAGCATCTTGTCGTCATCGTC |
| NO. 313 | |
| SEQ ID | CGAGGTGCTTCGTTACAGAACAATTAACATATTCAGCAGTAACTTGTCGTCATCGTC |
| NO. 314 | |
| SEQ ID | CGAGGTGCTTCGTTACAGAGCAGAGGTATAACCGATCATAAACTTGTCGTCATCGTC |
| NO. 315 | |
| SEQ ID | CGAGGTGCTTCGTTAGGTGTAACCAATCATAAACAGCAGGTACTTGTCGTCATCGTC |
| NO. 316 | |
| SEQ ID | CGAGGTGCTTCGTTAAACCGGATCAATGTCCAGCGGCAGTTTCTTGTCGTCATCGTC |
| NO. 317 | |
| SEQ ID | CGAGGTGCTTCGTTAGATTTCAAAACTCTGGTTCAGTTGGAACTTGTCGTCATCGTC |
| NO. 318 | |
| SEQ ID | CGAGGTGCTTCGTTAGATCAGGTGAATAAACGGGATAATCAGCTTGTCGTCATCGTC |
| NO. 319 | |
| SEQ ID | CGAGGTGCTTCGTTAAATTGAGCTACTTGCCCAGAACATTAACTTGTCGTCATCGTC |
| NO. 320 | |
| SEQ ID | CGAGGTGCTTCGTTAGATCAGGTACAGGTGTGAGATAATCATCTTGTCGTCATCGTC |
| NO. 321 | |
| SEQ ID | CGAGGTGCTTCGTTAAACAGAAACATCCAGGTAAATCAGGAACTTGTCGTCATCGTC |
| NO. 322 | |
| SEQ ID | CGAGGTGCTTCGTTAAACAGAAACATTGAAAATCAGCAGTAACTTGTCGTCATCGTC |
| NO. 323 | |
| SEQ ID | CGAGGTGCTTCGTTAAACAAACAGATTCATCCACAGCAGGCTCTTGTCGTCATCGTC |
| NO. 324 | |
| SEQ ID | CGAGGTGCTTCGTTACACATGATACCATTTTTCCTGGGTGAACTTGTCGTCATCGTC |
| NO. 325 | |
| SEQ ID | CGAGGTGCTTCGTTAAACAGAAATGTCCTGAATAAACAGATTCTTGTCGTCATCGTC |
| NO. 326 | |
| SEQ ID | CGAGGTGCTTCGTTAGGTGTTTTTAATCAGTTCGTCCAGGTACTTGTCGTCATCGTC |
| NO. 327 | |
| SEQ ID | CGAGGTGCTTCGTTAAACTTCGTTACCACGAGATTGCAGGAACTTGTCGTCATCGTC |
| NO. 328 | |
| SEQ ID | CGAGGTGCTTCGTTAAACTTTTTCTTCCATGTCGGTCAGGATCTTGTCGTCATCGTC |
| NO. 329 | |
| SEQ ID | CGAGGTGCTTCGTTACAGGTGCAGGTCGAAGTCCGGCATAGACTTGTCGTCATCGTC |
| NO. 330 | |
| SEQ ID | CGAGGTGCTTCGTTACAGTTGCTGCTGGATGTTCATCAGTTTCTTGTCGTCATCGTC |
| NO. 331 | |
| SEQ ID | CGAGGTGCTTCGTTAAACAGGTTTGTCAACCGGCAGCATACCCTTGTCGTCATCGTC |
| NO. 332 | |
| SEQ ID | CGAGGTGCTTCGTTAAACCGGCAGCATACCCAGATACTGAACCTTGTCGTCATCGTC |
| NO. 333 | |
| SEQ ID | CGAGGTGCTTCGTTACAGTTCATATTCCACGTGCGGTAAACGCTTGTCGTCATCGTC |
| NO. 334 | |
| SEQ ID | CGAGGTGCTTCGTTAAACGTGTAACGGAGATGCGCCCAGTTTCTTGTCGTCATCGTC |
| NO. 335 | |
| SEQ ID | CGAGGTGCTTCGTTACAGGGTGAAAACGTCCACATTCAGGATCTTGTCGTCATCGTC |
| NO. 336 | |
| SEQ ID | CGAGGTGCTTCGTTACAGGTGGGTGGTGAAAACGTAAACAAACTTGTCGTCATCGTC |
| NO. 337 | |
| SEQ ID | CGAGGTGCTTCGTTACAGACGTGCCTGGGTCAGCAGCATGAACTTGTCGTCATCGTC |
| NO. 338 | |
| SEQ ID | CGAGGTGCTTCGTTACACACCAACCAGAGCCAGGATAGACAGCATCTTGTCGTCATCGTC |
| NO. 339 | |
| SEQ ID | CGAGGTGCTTCGTTAAACTTCAACCGGGGTGTAAGACAGAGCCTTGTCGTCATCGTC |
| NO. 340 | |
| SEQ ID | CGAGGTGCTTCGTTAGATCAGACCCAGGTCACCGTCCATCAGGTTCTTGTCGTCATCGTC |
| NO. 341 | |
| SEQ ID | CGAGGTGCTTCGTTACAGACCCAGGTCACCGTCCATCAGGTTCTTGTCGTCATCGTC |
| NO. 342 | |
| SEQ ID | CGAGGTGCTTCGTTACAGAGACGGAGAGTGCAGAACCATCAGCTTGTCGTCATCGTC |
| NO. 343 | |
| SEQ ID | CGAGGTGCTTCGTTATGCTTTCAGGATCTGCTCAAACAGTTTCTTGTCGTCATCGTC |
| NO. 344 | |
| SEQ ID | CGAGGTGCTTCGTTACAGTTTGGTACGCAGGGTCAGCATGTACTTGTCGTCATCGTC |
| NO. 345 | |
| SEQ ID | CGAGGTGCTTCGTTAGATAGCGATAACAAAAGAGGTCAGACCCTTGTCGTCATCGTC |
| NO. 346 | |
| SEQ ID | CGAGGTGCTTCGTTAAACCAGGTACGGGTGGTCAGACAGGAACTTGTCGTCATCGTC |
| NO. 347 | |
| SEQ ID | CGAGGTGCTTCGTTACAGACCAGAGAAGATAGCGAACAGGTACTTGTCGTCATCGTC |
| NO. 348 | |
| SEQ ID | CGAGGTGCTTCGTTAAACAACCGGGGTGATGGTGTTCAGTTTCTTGTCGTCATCGTC |
| NO. 349 | |
| SEQ ID | CGAGGTGCTTCGTTACAGACCGTGAGCGTCGTCCACCAGAACCTTGTCGTCATCGTC |
| NO. 350 | |
| SEQ ID | CGAGGTGCTTCGTTATGCAACAATAACAGCGAACATCAGCATCTTGTCGTCATCGTC |
| NO. 351 | |
| SEQ ID | CGAGGTGCTTCGTTACACTCCCGCCAGCGTACCTGCTAACAGCTTGTCGTCATCGTC |
| NO. 352 | |
| SEQ ID | CGAGGTGCTTCGTTATGCACGAGGAGACAGCGGAGCCAGAGACTTGTCGTCATCGTC |
| NO. 353 | |
| SEQ ID | CGAGGTGCTTCGTTAAACGCCAGACAGTTTCACACCCAGCAGAACCTTGTCGTCATCGTC |
| NO. 354 | |
| SEQ ID | CGAGGTGCTTCGTTAAACGGTGCCCACAATGGTAAACAGGGTCTTGTCGTCATCGTC |
| NO. 355 | |
| SEQ ID | CGAGGTGCTTCGTTAAACATTCGGAACTTTCATAGCCAGCAGCTTGTCGTCATCGTC |
| NO. 356 | |
| SEQ ID | CGAGGTGCTTCGTTAAACTTCCAGACCGTTGATTTTGGTCATAAACTTGTCGTCATCGTC |
| NO. 357 | |
| SEQ ID | CGAGGTGCTTCGTTACATAACAGACAGCAGGTCGTTCAGGAACTTGTCGTCATCGTC |
| NO. 358 | |
| SEQ ID | CGAGGTGCTTCGTTAAATGAACCATGCGATAGCCATCAGACCCTTGTCGTCATCGTC |
| NO. 359 | |
| SEQ ID | CGAGGTGCTTCGTTAAACAGCAACAACATAAGAGATGATGAACTTGTCGTCATCGTC |
| NO. 360 | |
| SEQ ID | CGAGGTGCTTCGTTACAGGTGGGTGTTGTGGTGGATCAGAGCCTTGTCGTCATCGTC |
| NO. 361 | |
| SEQ ID | CGAGGTGCTTCGTTAAACATTAGCAGCCCAGTCCAGCAGAATCTTGTCGTCATCGTC |
| NO. 362 | |
| SEQ ID | CGAGGTGCTTCGTTAAACCGGAGACAGTTCAGAGAACAGAGCCTTGTCGTCATCGTC |
| NO. 363 | |
| SEQ ID | CGAGGTGCTTCGTTACAGTTCGGTGTAGTATTCCAGCAGAGACTTGTCGTCATCGTC |
| NO. 364 | |
| SEQ ID | CGAGGTGCTTCGTTAAACTTCAAACGGAGATTTCGCAATGTGCTTGTCGTCATCGTC |
| NO. 365 | |
| SEQ ID | CGAGGTGCTTCGTTAAACCGGCGGAGCCCAAGACAGAACAACCTTGTCGTCATCGTC |
| NO. 366 | |
| SEQ ID | CGAGGTGCTTCGTTAAACGGTCACAAACAGATCCATTGCGGTCTTGTCGTCATCGTC |
| NO. 367 | |
| SEQ ID | CGAGGTGCTTCGTTAAACAAACAGGTCCATAGCGGTAACATACTTGTCGTCATCGTC |
| NO. 368 | |
| SEQ ID | CGAGGTGCTTCGTTATGCGCCAACAATCCAGGTAACAACGTACTTGTCGTCATCGTC |
| NO. 369 | |
| SEQ ID | CGAGGTGCTTCGTTACAGAACCGGAACAGAACCATACAGAGCCTTGTCGTCATCGTC |
| NO. 370 | |
| SEQ ID | CGAGGTGCTTCGTTACAGCAGCAGAGACAGGGTTTCCAGCAGAGCCTTGTCGTCATCGTC |
| NO. 371 | |
| SEQ ID | CGAGGTGCTTCGTTACAGCAGAGACAGGGTTTCCAGCAGAGCCTTGTCGTCATCGTC |
| NO. 372 | |
| SEQ ID | CGAGGTGCTTCGTTAGATCCAGTAAAACATATTGAAGATCAGCTTGTCGTCATCGTC |
| NO. 373 | |
| SEQ ID | CGAGGTGCTTCGTTAAACCGGAGAGGTGGTCGGGTCCAGAGACTTGTCGTCATCGTC |
| NO. 374 | |
| SEQ ID | CGAGGTGCTTCGTTACAGGTAGATGTTAGCCAGAGACATTTTCTTGTCGTCATCGTC |
| NO. 375 | |
| SEQ ID | CGAGGTGCTTCGTTAAACCAGGAAGTCCAGCGGGAAAGAGAACTTGTCGTCATCGTC |
| NO. 376 | |
| SEQ ID | CGAGGTGCTTCGTTACAGCTTCACGGTATATTCTTGCAGAAACTTGTCGTCATCGTC |
| NO. 377 | |
| SEQ ID | CGAGGTGCTTCGTTAGATTTTGGTAATCATAGCGTTCAGGATCTTGTCGTCATCGTC |
| NO. 378 | |
| SEQ ID | CGAGGTGCTTCGTTAGATGTAAGCGTGCAGTTCAGACAGTTTCTTGTCGTCATCGTC |
| NO. 379 | |
| SEQ ID | CGAGGTGCTTCGTTAAACGCTAACCGGCAGTAACAGCAGAGACTTGTCGTCATCGTC |
| NO. 380 | |
| SEQ ID | CGAGGTGCTTCGTTACAGGGTCACGGTCAGTTTTGCCATATACTTGTCGTCATCGTC |
| NO. 381 | |
| SEQ ID | CGAGGTGCTTCGTTACAGTTCACCCGGAGAACCATACATATACTTGTCGTCATCGTC |
| NO. 382 | |
| SEQ ID | CGAGGTGCTTCGTTAAACAATGTAAACAATAGAGAACGGCATAACCTTGTCGTCATCGTC |
| NO. 383 | |
| SEQ ID | CGAGGTGCTTCGTTAGATGTAAACGATAGAGAACGGCATAACCTTGTCGTCATCGTC |
| NO. 384 | |
| SEQ ID | CGAGGTGCTTCGTTAGATGTAAACAATAGAGAACGGCATAACCAGCTTGTCGTCATCGTC |
| NO. 385 | |
| SEQ ID | CGAGGTGCTTCGTTACAGGTAGAACAGGTGAGAAGAAGACATGGTCTTGTCGTCATCGTC |
| NO. 386 | |
| SEQ ID | CGAGGTGCTTCGTTACAGCAGGATAGAAATGCCGGTAATGAACTTGTCGTCATCGTC |
| NO. 387 | |
| SEQ ID | CGAGGTGCTTCGTTAAACCAGGAATGCACGGTGCAGCAGAACCTTGTCGTCATCGTC |
| NO. 388 | |
| SEQ ID | CGAGGTGCTTCGTTAAACCAGGTTCAGAACTTCAGAAGAGAACTTGTCGTCATCGTC |
| NO. 389 | |
| SEQ ID | CGAGGTGCTTCGTTACAGAAACTCCAGGTACGGACCCAGACGCTTGTCGTCATCGTC |
| NO. 390 | |
| SEQ ID | CGAGGTGCTTCGTTAAACCGGCATAATTTCACGAGACAGTTTCTTGTCGTCATCGTC |
| NO. 391 | |
| SEQ ID | CGAGGTGCTTCGTTAAACATAGTACGGTAAGATTGCCAGCAGCTTGTCGTCATCGTC |
| NO. 392 | |
| SEQ ID | CGAGGTGCTTCGTTAAGCGTTTGCGTTCAGGTCCGGCAGAAACTTGTCGTCATCGTC |
| NO. 393 | |
| SEQ ID | CGAGGTGCTTCGTTAGATCGGAGAAGAGATTTCAGAGGTGTACTTGTCGTCATCGTC |
| NO. 394 | |
| SEQ ID | CGAGGTGCTTCGTTACAGAGCCGGATAGCGATTGAACAGGTTCTTGTCGTCATCGTC |
| NO. 395 | |
| SEQ ID | CGAGGTGCTTCGTTACAGCAGCCAGGTAACTGATGCGATCAGGAACTTGTCGTCATCGTC |
| NO. 396 | |
| SEQ ID | CGAGGTGCTTCGTTACAGCCAGGTAACAGATGCGATCAGGAACTTGTCGTCATCGTC |
| NO. 397 | |
| SEQ ID | CGAGGTGCTTCGTTAAACAGCTTCCATAAATTCGTCCAGGAACTTGTCGTCATCGTC |
| NO. 398 | |
| SEQ ID | CGAGGTGCTTCGTTAGATCAGCGGGATAACCGGAGACAGAGCCTTGTCGTCATCGTC |
| NO. 399 | |
| SEQ ID | CGAGGTGCTTCGTTAAGCCAGTTGAACGGCAGGCCATAAATACTTGTCGTCATCGTC |
| NO. 400 | |
| SEQ ID | CGAGGTGCTTCGTTAAACAACACGTAACGGTTCCCATAAACGCTTGTCGTCATCGTC |
| NO. 401 | |
| SEQ ID | CGAGGTGCTTCGTTACAGCAGGCACGGGGTCATACCGAACAGCAGCTTGTCGTCATCGTC |
| NO. 402 | |
| SEQ ID | CGAGGTGCTTCGTTACAGGCACGGGGTCATACCGAACAGCAGCTTGTCGTCATCGTC |
| NO. 403 | |
| SEQ ID | CGAGGTGCTTCGTTACAGTTTCGCAATGGTTTCGTCCAGACCCTTGTCGTCATCGTC |
| NO. 404 | |
| SEQ ID | CGAGGTGCTTCGTTAAACAGGCGGCGGCATACCAATAACACGCTTGTCGTCATCGTC |
| NO. 405 | |
| SEQ ID | CGAGGTGCTTCGTTAAACTTCCGGTTCTTTTTCGTCCAGCAGCTTGTCGTCATCGTC |
| NO. 406 | |
| SEQ ID | CGAGGTGCTTCGTTAGATAGAAGAGTAATACTGGTCAATGAACTTGTCGTCATCGTC |
| NO. 407 | |
| SEQ ID | CGAGGTGCTTCGTTATGCTTCGTAGTTCAGACCCGTCAGAATCTTGTCGTCATCGTC |
| NO. 408 | |
| SEQ ID | CGAGGTGCTTCGTTACAGGGTCGGGTCAGCAGGGTCCAGAATCTTGTCGTCATCGTC |
| NO. 409 | |
| SEQ ID | CGAGGTGCTTCGTTACAGGAACGGAACCATAACAATCAGGATCTTGTCGTCATCGTC |
| NO. 410 | |
| SEQ ID | CGAGGTGCTTCGTTACATCAGGGTAACCAGGTACAGCATGAACTTGTCGTCATCGTC |
| NO. 411 | |
| SEQ ID | CGAGGTGCTTCGTTAAACGGTAACCAGGTACATGAACAGGAACTTGTCGTCATCGTC |
| NO. 412 | |
| SEQ ID | CGAGGTGCTTCGTTACAGCAGCGGGAAAAACACGTTCAGGAACTTGTCGTCATCGTC |
| NO. 413 | |
| SEQ ID | CGAGGTGCTTCGTTACAGTGCCAGGTTACCCAGAAAAATATACTTGTCGTCATCGTC |
| NO. 414 | |
| SEQ ID | CGAGGTGCTTCGTTAGGTGGTATAGAACACAGCAACCATTTTCTTGTCGTCATCGTC |
| NO. 415 | |
| SEQ ID | CGAGGTGCTTCGTTACAGGGTGTAGATAAACGGATTCAGAACCTTGTCGTCATCGTC |
| NO. 416 | |
| SEQ ID | CGAGGTGCTTCGTTAAACAAACACAACCAGTTCGTTCACATACTTGTCGTCATCGTC |
| NO. 417 | |
| SEQ ID | CGAGGTGCTTCGTTAAACAACGGTCACGGTGTAGATACCCAGGAACTTGTCGTCATCGTC |
| NO. 418 | |
| SEQ ID | CGAGGTGCTTCGTTAAACGGTAACGGTGTAGATACCCAGGAACTTGTCGTCATCGTC |
| NO. 419 | |
| SEQ ID | CGAGGTGCTTCGTTAGATAGATGCGAAAAAGGTGAACAGGAACTTGTCGTCATCGTC |
| NO. 420 | |
| SEQ ID | CGAGGTGCTTCGTTAGATAGCCAGCAGATAGCAGTCAATAGACTTGTCGTCATCGTC |
| NO. 421 | |
| SEQ ID | CGAGGTGCTTCGTTACAGGTGCGGAGAACCTTGCAGCAGAGACTTGTCGTCATCGTC |
| NO. 422 | |
| SEQ ID | CGAGGTGCTTCGTTACAGCGGGAACAGACGTTCACCCAGCATCTTGTCGTCATCGTC |
| NO. 423 | |
| SEQ ID | CGAGGTGCTTCGTTAAACAAACAGCAGAACAGAGAACAGGAACTTGTCGTCATCGTC |
| NO. 424 | |
| SEQ ID | CGAGGTGCTTCGTTAAACGCCCATAACCAGCGGCAGAACCAGCTTGTCGTCATCGTC |
| NO. 425 | |
| SEQ ID | CGAGGTGCTTCGTTACAGCGGCAGAACCAGATCATGCAGACGCTTGTCGTCATCGTC |
| NO. 426 | |
| SEQ ID | CGAGGTGCTTCGTTAAACAGAGTAAACGTGAGAACCAACAGCCTTGTCGTCATCGTC |
| NO. 427 | |
| SEQ ID | CGAGGTGCTTCGTTATGCCGGAAAAGAGATAATGCTCAGCAGCTTGTCGTCATCGTC |
| NO. 428 | |
| SEQ ID | CGAGGTGCTTCGTTACATGAACGGAGAGAAAACGGTCAGGAACTTGTCGTCATCGTC |
| NO. 429 | |
| SEQ ID | CGAGGTGCTTCGTTATGCAGAAGAGAATGCAGCGAACAGAACCTTGTCGTCATCGTC |
| NO. 430 | |
| SEQ ID | CGAGGTGCTTCGTTACAGACCCCACAGAGAAACCAGTAACAGCTTGTCGTCATCGTC |
| NO. 431 | |
| SEQ ID | CGAGGTGCTTCGTTAAACTTCAACAACACCACCCAGTTGATGCTTGTCGTCATCGTC |
| NO. 432 | |
| SEQ ID | CGAGGTGCTTCGTTAAACACGTTGAACTGCATCCAGGATAGACTTGTCGTCATCGTC |
| NO. 433 | |
| SEQ ID | CGAGGTGCTTCGTTACAGAGAGTTGCGATATTCAGACAGTTTCTTGTCGTCATCGTC |
| NO. 434 | |
| SEQ ID | CGAGGTGCTTCGTTAAATGAATTTCAGGTTCTGGTCTGCTAACAGCTTGTCGTCATCGTC |
| NO. 435 | |
| SEQ ID | CGAGGTGCTTCGTTACAGGTACGGCTCAAAATAATTCAGAACCTTGTCGTCATCGTC |
| NO. 436 | |
| SEQ ID | CGAGGTGCTTCGTTAAATAGACGGAATTGCGCCAACCAGAGCCTTGTCGTCATCGTC |
| NO. 437 | |
| SEQ ID | CGAGGTGCTTCGTTAAACACGGGTCAGCGGGTTATACAGGAACTTGTCGTCATCGTC |
| NO. 438 | |
| SEQ ID | CGAGGTGCTTCGTTAAACCGGGGTAGAGATTTCAACCATGTGCTTGTCGTCATCGTC |
| NO. 439 | |
| SEQ ID | CGAGGTGCTTCGTTAAACAATTTCGTCACCAGCCAGCAGTTTCTTGTCGTCATCGTC |
| NO. 440 | |
| SEQ ID | CGAGGTGCTTCGTTAAACGGTGTGAACAACCTGACCACCTAAAATCTTGTCGTCATCGTC |
| NO. 441 | |
| SEQ ID | CGAGGTGCTTCGTTACAGAAAAACAGGGCTACCCGCCATTGCCTTGTCGTCATCGTC |
| NO. 442 | |
| SEQ ID | CGAGGTGCTTCGTTAAGCTGCAATGATGGTGGTGCTCATGTACTTGTCGTCATCGTC |
| NO. 443 | |
| SEQ ID | CGAGGTGCTTCGTTACAGACCAAAAATCTGAGCAACCAGGATCTTGTCGTCATCGTC |
| NO. 444 | |
| SEQ ID | CGAGGTGCTTCGTTACAGACCCAGAACCTGTGCAATCAGAATCTTGTCGTCATCGTC |
| NO. 445 | |
| SEQ ID | CGAGGTGCTTCGTTACAGACCCAGGAACAGAGCAGCCCAGATACGCTTGTCGTCATCGTC |
| NO. 446 | |
| SEQ ID | CGAGGTGCTTCGTTACAGCAGAACCGTCCAACCACCCAGCAGCTTGTCGTCATCGTC |
| NO. 447 | |
| SEQ ID | CGAGGTGCTTCGTTAAACGCCATGAACCAGGAACTCAAACAGTTTCTTGTCGTCATCGTC |
| NO. 448 | |
| SEQ ID | CGAGGTGCTTCGTTAGGTGTACGGCAGCGGTTTAGCCAGTTTCTTGTCGTCATCGTC |
| NO. 449 | |
| SEQ ID | CGAGGTGCTTCGTTACAGCAGAACCGGCTGGTGAGACAGTTTCTTGTCGTCATCGTC |
| NO. 450 | |
| SEQ ID | CGAGGTGCTTCGTTACAGACCGTTTGCTTCGTCCAGCAGGAACTTGTCGTCATCGTC |
| NO. 451 | |
| SEQ ID | CGAGGTGCTTCGTTAGGTGGTAGCCAGAGAGTCTTGCAGATACTTGTCGTCATCGTC |
| NO. 452 | |
| SEQ ID | CGAGGTGCTTCGTTACAGAGAAGAAGAGATAGATGCCATCAGGAACTTGTCGTCATCGTC |
| NO. 453 | |
| SEQ ID | CGAGGTGCTTCGTTAAGAAGAAGAGATAGATGCCATCAGGAACTTGTCGTCATCGTC |
| NO. 454 | |
| SEQ ID | CGAGGTGCTTCGTTACAGGCTGCTTGAAATAGATGCCATCAGCTTGTCGTCATCGTC |
| NO. 455 | |
| SEQ ID | CGAGGTGCTTCGTTATGCCGAGAAGTACAGAGCGAACAGCAGCTTGTCGTCATCGTC |
| NO. 456 | |
| SEQ ID | CGAGGTGCTTCGTTAAATACCCGGATAGTGTTTCATCAGACGCTTGTCGTCATCGTC |
| NO. 457 | |
| SEQ ID | CGAGGTGCTTCGTTACAGAACACCAGAATATGCTGACATGAACTTGTCGTCATCGTC |
| NO. 458 | |
| SEQ ID | CGAGGTGCTTCGTTAAACGGTTGCCAGCAGCGGACCCATACCCTTGTCGTCATCGTC |
| NO. 459 | |
| SEQ ID | CGAGGTGCTTCGTTACAGCAGGATGGTGAAGTTTTCCAGAACAGACTTGTCGTCATCGTC |
| NO. 460 | |
| SEQ ID | CGAGGTGCTTCGTTAAACCAGCAGGATGGTGAAGTTTTCCAGAACCTTGTCGTCATCGTC |
| NO. 461 | |
| SEQ ID | CGAGGTGCTTCGTTACATTTTGGTTTCCAGGGTCATCAGGAACTTGTCGTCATCGTC |
| NO. 462 | |
| SEQ ID | CGAGGTGCTTCGTTAAACCAGGTAGAAAGAAACTGCAAACGTAACCTTGTCGTCATCGTC |
| NO. 463 | |
| SEQ ID | CGAGGTGCTTCGTTACAGCAGTAAGGTAACCTGAGACAGAGCCTTGTCGTCATCGTC |
| NO. 464 | |
| SEQ ID | CGAGGTGCTTCGTTAAACAGATGCAGCGTGTTCCGGGGTGTACTTGTCGTCATCGTC |
| NO. 465 | |
| SEQ ID | CGAGGTGCTTCGTTAGGTTTCCCAGAAGGTTTCAGCCAGAGACTTGTCGTCATCGTC |
| NO. 466 | |
| SEQ ID | CGAGGTGCTTCGTTAAACGGTGTTAGAGATAGCAGCCATACGCTTGTCGTCATCGTC |
| NO. 467 | |
| SEQ ID | CGAGGTGCTTCGTTACAGCGGAACAGACGGAGAAGCCAGAACCTTGTCGTCATCGTC |
| NO. 468 | |
| SEQ ID | CGAGGTGCTTCGTTAAACAGACGGAGATGCCAGAACCATGTACTTGTCGTCATCGTC |
| NO. 469 | |
| SEQ ID | CGAGGTGCTTCGTTACAGAGACACGTCCTGTTTCAGCAGCATCTTGTCGTCATCGTC |
| NO. 470 | |
| SEQ ID | CGAGGTGCTTCGTTACAGTGCAATTAACATATTCAGCAGTAACTTGTCGTCATCGTC |
| NO. 471 | |
| SEQ ID | CGAGGTGCTTCGTTACAGAGCAGATGCGTAACCGATCATAAACTTGTCGTCATCGTC |
| NO. 472 | |
| SEQ ID | CGAGGTGCTTCGTTATGCGTAACCAATCATAAACAGCAGGTACTTGTCGTCATCGTC |
| NO. 473 | |
| SEQ ID | CGAGGTGCTTCGTTAAACCGGGTTGATGTCCAGCGGCAGTTTCTTGTCGTCATCGTC |
| NO. 474 | |
| SEQ ID | CGAGGTGCTTCGTTAGATTTCAAATGACTGGTTCAGTTGTGACTTGTCGTCATCGTC |
| NO. 475 | |
| SEQ ID | CGAGGTGCTTCGTTAGATCAGGTGGATGCACGGGATAATCAGCTTGTCGTCATCGTC |
| NO. 476 | |
| SEQ ID | CGAGGTGCTTCGTTAGATTGAGCTACTTGCCCACAGCATTAACTTGTCGTCATCGTC |
| NO. 477 | |
| SEQ ID | CGAGGTGCTTCGTTAGATCAGAGACAGGTGTGAGATAATCATCTTGTCGTCATCGTC |
| NO. 478 | |
| SEQ ID | CGAGGTGCTTCGTTAAACAGAAACGTCCAGGTAGGTCAGGAACTTGTCGTCATCGTC |
| NO. 479 | |
| SEQ ID | CGAGGTGCTTCGTTAAACAGAAACATTGAAGGTCAGCAGTAACTTGTCGTCATCGTC |
| NO. 480 | |
| SEQ ID | CGAGGTGCTTCGTTAAACAAACGGGTTCATCCACAGCAGGCTCTTGTCGTCATCGTC |
| NO. 481 | |
| SEQ ID | CGAGGTGCTTCGTTAAACGTGATACCATTCTTCCTGGGTGAACTTGTCGTCATCGTC |
| NO. 482 | |
| SEQ ID | CGAGGTGCTTCGTTAAACAGAAATGTCCTGTGAAAACAGATTCTTGTCGTCATCGTC |
| NO. 483 | |
| SEQ ID NO. | |
| 484 | AAGCAGTGGTATCAACGCAGAGT XXXXXX TTT TTT TTT TTT TTT TTT TTT TTT TTT TTT VN |
| SEQ ID NO. | AAGCAGTGGTATCAACGCAGAGTCGACrGrG+G |
| 485 | |
| SEQ ID NO. | AAGCAGTGGTATCAACGCAGAGT |
| 486 | |
| SEQ ID NO. | CAAGCAGAAGACGGCATACGAGAT XXXXXXXX GTCTCGTGGGCTCGG |
| 487 | |
| SEQ ID NO. | AATGATACGGCGACCACCGAGATCTACACTCTTTCCCTACACGACGCTCTTCCGATCTNHNHNAAGCAGTGGTATC |
| 488 | AACGCAGAGT |
| SEQ ID NO. | AAGCAGTGGTATCAACGCAGAGT XXXXXX TTT TTT TTT TTT TTT TTT TTT TTT TTT TTT VN |
| 484 | |
| SEQ ID NO. | AAGCAGTGGTATCAACGCAGAGTCGACrGrG + G |
| 485 | |
| SEQ ID NO. | AAGCAGTGGTATCAACGCAGAGT |
| 486 | |
| SEQ ID NO. | CAAGCAGAAGACGGCATACGAGATXXXXXXXXGTCTCGTGGGCTCGG |
| 487 | |
| SEQ ID NO. | AATGATACGGCGACCACCGAGATCTACACTCTTTCCCTACACGACGCTCTTCCGATCTNHNHNAAGCAGTGGTATC |
| 488 | AACGCAGAGT |
| SEQ ID: 501 | ATGGACGACGACGACAAGCGTCAGTTCGGTCCGGACTGGATCGTTGCTTAACGAAGCACCTCGCTAAAAAAAAAA |
| | AAAAAAAAAAAAAAA |
| SEQ ID: 502 | ATGGACGACGACGACAAGATGGTTGGGGTCCGGACCCGCTGTACGTTTAACGAAGCACCTCGCTAAAAAAAAAA |
| | AAAAAAAAAAAAAAA |
| SEQ ID: 503 | ATGGACGACGACGACAAGAACCTGGCTCAGGACCTGGCTACCGTTTAACGAAGCACCTCGCTAAAAAAAAAAAAA |
| | AAAAAAAAAAAA |
| SEQ ID: 504 | ATGGACGACGACGACAAGCAGCTGGCTCGTCAGCAGGITCACGTTTAACGAAGCACCTCGCTAAAAAAAAAAAAA |
| | AAAAAAAAAAAA |
| SEQ ID: 505 | ATGGACGACGACGACAAGTTCCTGCAGGACGTTATGAACATCCTGTAACGAAGCACCTCGCTAAAAAAAAAAAAA |
| | AAAAAAAAAAAA |
| SEQ ID: 506 | ATGGACGACGACGACAAGCTGCTGCAGGAATACAACTGGGAACTGTAACGAAGCACCTCGCTAAAAAAAAAAAAA |
| | AAAAAAAAAAAA |
| SEQ ID: 507 | ATGGACGACGACGACAAGCGTATGATGGAATACGGTACCACCATGGTTTAACGAAGCACCTCGCTAAAAAAAAAA |
| | AAAAAAAAAAAAAAA |
| SEQ ID: 508 | ATGGACGACGACGACAAGGTTATGAACATCCTGCTGCAGTACGTTGTTTAACGAAGCACCTCGCTAAAAAAAAAAA |
| | AAAAAAAAAAAAAA |
| SEQ ID: 509 | ATGGACGACGACGACAAGGTTATGAACATCCTGCTGCAGTACGTTTAACGAAGCACCTCGCTAAAAAAAAAAAAAA |
| | AAAAAAAAAAA |
| SEQ ID: 510 | ATGGACGACGACGACAAGGAACTGGCTGAATACCTGTACAACATCTAACGAAGCACCTCGCTAAAAAAAAAAAAA |
| | AAAAAAAAAAAA |
| SEQ ID: 511 | ATGGACGACGACGACAAGATCCTGATGCACTGCCAGACCACCCTGTAACGAAGCACCTCGCTAAAAAAAAAAAAA |
| | AAAAAAAAAAAA |
| SEQ ID: 512 | ATGGACGACGACGACAAGATGCTGTACCAGCACCTGCTGCCGCTGTAACGAAGCACCTCGCTAAAAAAAAAAAAA |
| | AAAAAAAAAAAA |
| SEQ ID: 513 | ATGGACGACGACGACAAGGGTATCGTTGAACAGTGCTGCACCTCTATCTAACGAAGCACCTCGCTAAAAAAAAAAA |
| | AAAAAAAAAAAAAA |
| SEQ ID: 514 | ATGGACGACGACGACAAGGCTCTGTGGATGCGTCTGCTGCCGCTGCTGTAACGAAGCACCTCGCTAAAAAAAAAA |
| | AAAAAAAAAAAAAAA |
| SEQ ID: 515 | ATGGACGACGACGACAAGCTGGCTCTGTGGGGTCCGGACCCGGCTGCTTAACGAAGCACCTCGCTAAAAAAAAAA |
| | AAAAAAAAAAAAAAA |
| SEQ ID: 516 | ATGGACGACGACGACAAGCGTCTGCTGCCGCTGCTGGCTCTGCTGGCTCTGTAACGAAGCACCTCGCTAAAAAAAA |
| | AAAAAAAAAAAAAAAAA |
| SEQ ID: 517 | ATGGACGACGACGACAAGGCTCTGTGGATGCGTCTGCTGCCGCTGTAACGAAGCACCTCGCTAAAAAAAAAAAAA |
| | AAAAAAAAAAAA |
| SEQ ID: 518 | ATGGACGACGACGACAAGCACCTGGTTGAAGCTCTGTACCTGGTTTAACGAAGCACCTCGCTAAAAAAAAAAAAAA |
| | AAAAAAAAAAA |
| SEQ ID: 519 | ATGGACGACGACGACAAGTCTCTGCAGAAACGTGGTATCGTTGAACAGTAACGAAGCACCTCGCTAAAAAAAAAA |
| | AAAAAAAAAAAAAAA |
| SEQ ID: 520 | ATGGACGACGACGACAAGTCTCTGCAGCCGCTGGCTCTGGAAGGTTAACGAAGCACCTCGCTAAAAAAAAAAAAA |
| | AAAAAAAAAAAA |
| SEQ ID: 521 | ATGGACGACGACGACAAGTCTCTGTACCAGCTGGAAAACTACTGCTAACGAAGCACCTCGCTAAAAAAAAAAAAAA |
| | AAAAAAAAAAA |
| SEQ ID: 522 | ATGGACGACGACGACAAGGTTTGCGGTGAACGTGGTTTCTTCTACACCTAACGAAGCACCTCGCTAAAAAAAAAAA |
| | AAAAAAAAAAAAAA |
| SEQ ID: 523 | ATGGACGACGACGACAAGGCTCTGTGGGGTCCGGACCCGGCTGCTGCTTAACGAAGCACCTCGCTAAAAAAAAAA |
| | AAAAAAAAAAAAAAA |
| SEQ ID: 524 | ATGGACGACGACGACAAGCGTCTGCTGCCGCTGCTGGCTCTGCTGTAACGAAGCACCTCGCTAAAAAAAAAAAAA |
| | AAAAAAAAAAAA |
| SEQ ID: 525 | ATGGACGACGACGACAAGTGGGGTCCGGACCCGGCTGCTGCTTAACGAAGCACCTCGCTAAAAAAAAAAAAAAAA |
| | AAAAAAAAA |
| SEQ ID: 526 | ATGGACGACGACGACAAGTTCCTGATCGTTCTGTCTGTTGCTCTGTAACGAAGCACCTCGCTAAAAAAAAAAAAAA |
| | AAAAAAAAAAA |
| SEQ ID: 527 | ATGGACGACGACGACAAGAAACTGCAGGTTTTCCTGATCGTTCTGTAACGAAGCACCTCGCTAAAAAAAAAAAAAA |
| | AAAAAAAAAAA |
| SEQ ID: 528 | ATGGACGACGACGACAAGTTCCTGTGGTCTGTTTTCATGCTGATCTAACGAAGCACCTCGCTAAAAAAAAAAAAAA |
| | AAAAAAAAAAA |
| SEQ ID: 529 | ATGGACGACGACGACAAGTTCCTGTTCGCTGTTGGTTTCTACCTGTAACGAAGCACCTCGCTAAAAAAAAAAAAAA |
| | AAAAAAAAAAA |
| SEQ ID: 530 | ATGGACGACGACGACAAGCTGAACATCGACCTGCTGTGGTCTGTTTAACGAAGCACCTCGCTAAAAAAAAAAAAAA |
| | AAAAAAAAAAA |
| SEQ ID: 531 | ATGGACGACGACGACAAGGTTCTGTTCGGTCTGGGTTTCGCTATCTAACGAAGCACCTCGCTAAAAAAAAAAAAAA |
| | AAAAAAAAAAA |
| SEQ ID: 532 | ATGGACGACGACGACAAGTTCCTGTGGTCTGTTTTCTGGCTGATCTAACGAAGCACCTCGCTAAAAAAAAAAAAAA |
| | AAAAAAAAAAA |
| SEQ ID: 533 | ATGGACGACGACGACAAGAACCTGTTCCTGTTCCTGTTCGCTGTTTAACGAAGCACCTCGCTAAAAAAAAAAAAAA |
| | AAAAAAAAAAA |
| SEQ ID: 534 | ATGGACGACGACGACAAGTACCTGCTGCTGCGTGTTCTGAACATCTAACGAAGCACCTCGCTAAAAAAAAAAAAAA |
| | AAAAAAAAAAA |
| SEQ ID: 535 | ATGGACGACGACGACAAGCACCTGTGCGGTTCTCACCTGGTTGAAGCTTAACGAAGCACCTCGCTAAAAAAAAAAA |
| | AAAAAAAAAAAAAA |
| SEQ ID: 536 | ATGGACGACGACGACAAGTCTCACCTGGTTGAAGCTCTGTACCTGGTTTAACGAAGCACCTCGCTAAAAAAAAAAA |
| | AAAAAAAAAAAAAA |
| SEQ ID: 537 | ATGGACGACGACGACAAGCTGTGCGGTTCTCACCTGGTTGAAGCTCTGTAACGAAGCACCTCGCTAAAAAAAAAAA |
| | AAAAAAAAAAAAAA |
| SEQ ID: 538 | ATGGACGACGACGACAAGGCTCTGACCGCTGTTGCTGAAGAAGTTTAACGAAGCACCTCGCTAAAAAAAAAAAAA |
| | AAAAAAAAAAAA |
| SEQ ID: 539 | ATGGACGACGACGACAAGTCTCTGTACCACGTTTACGAAGTTAACCTGTAACGAAGCACCTCGCTAAAAAAAAAAA |
| | AAAAAAAAAAAAAA |
| SEQ ID: 540 | ATGGACGACGACGACAAGACCATCGCTGACTTCTGGCAGATGGTTTAACGAAGCACCTCGCTAAAAAAAAAAAAA |
| | AAAAAAAAAAAA |
| SEQ ID: 541 | ATGGACGACGACGACAAGGTTATCGTTATGCTGACCCCGCTGGTTTAACGAAGCACCTCGCTAAAAAAAAAAAAAA |
| | AAAAAAAAAAA |
| SEQ ID: 542 | ATGGACGACGACGACAAGCTGCTGCCGCCGCTGCTGGAACACCTGTAACGAAGCACCTCGCTAAAAAAAAAAAAA |
| | AAAAAAAAAAAA |
| SEQ ID: 543 | ATGGACGACGACGACAAGTCTCTGGCTGCTGGTGTTAAACTGCTGTAACGAAGCACCTCGCTAAAAAAAAAAAAAA |
| | AAAAAAAAAAA |
| SEQ ID: 544 | ATGGACGACGACGACAAGTCTCTGTCTCCGCTGCAGGCTGAACTGTAACGAAGCACCTCGCTAAAAAAAAAAAAAA |
| | AAAAAAAAAAA |
| SEQ ID: 545 | ATGGACGACGACGACAAGATGGTTTGGGAATCTGGTTGCACCGTTTAACGAAGCACCTCGCTAAAAAAAAAAAAA |
| | AAAAAAAAAAAA |
| SEQ ID: 546 | ATGGACGACGACGACAAGGTTATGATCATCGTTTCTTCTCTGGCTGTTTAACGAAGCACCTCGCTAAAAAAAAAAAA |
| | AAAAAAAAAAAAA |
| SEQ ID: 547 | ATGGACGACGACGACAAGGCTCTGGGTGACCTGTTCCAGTCTATCTAACGAAGCACCTCGCTAAAAAAAAAAAAAA |
| | AAAAAAAAAAA |
| SEQ ID: 548 | ATGGACGACGACGACAAGGACCTGACGTCTTTCCTGCTGTCTCTGTAACGAAGCACCTCGCTAAAAAAAAAAAAAA |
| | AAAAAAAAAAA |
| SEQ ID: 549 | ATGGACGACGACGACAAGGAAATCCTGGGTGCTCTGCTGTCTATCTAACGAAGCACCTCGCTAAAAAAAAAAAAAA |
| | AAAAAAAAAAA |
| SEQ ID: 550 | ATGGACGACGACGACAAGTTCCTGCTGTCTCTGTTCTCTCTGTGGCTGTAACGAAGCACCTCGCTAAAAAAAAAAAA |
| | AAAAAAAAAAAAA |
| SEQ ID: 551 | ATGGACGACGACGACAAGATCCTGGCTGTTGACGGTGTTCTGTCTGTTTAACGAAGCACCTCGCTAAAAAAAAAAA |
| | AAAAAAAAAAAAAA |
| SEQ ID: 552 | ATGGACGACGACGACAAGATCCTGGGTGCTCTGCTGTCTATCCTGTAACGAAGCACCTCGCTAAAAAAAAAAAAAA |
| | AAAAAAAAAAA |
| SEQ ID: 553 | ATGGACGACGACGACAAGATCCTGAAAGACTTCTCTATCCTGCTGTAACGAAGCACCTCGCTAAAAAAAAAAAAAA |
| | AAAAAAAAAAA |
| SEQ ID: 554 | ATGGACGACGACGACAAGATCCTGTCTGCTCACGTTGCTACCGCTTAACGAAGCACCTCGCTAAAAAAAAAAAAAA |
| | AAAAAAAAAAA |
| SEQ ID: 555 | ATGGACGACGACGACAAGCTGCTGATCGACCTGACCTCTTTCCTGTAACGAAGCACCTCGCTAAAAAAAAAAAAAA |
| | AAAAAAAAAAA |
| SEQ ID: 556 | ATGGACGACGACGACAAGCTGCTGATGGAAGGTGTTCCGAAATCTCTGTAACGAAGCACCTCGCTAAAAAAAAAA |
| | AAAAAAAAAAAAAAA |
| SEQ ID: 557 | ATGGACGACGACGACAAGICTATCTCTGTTCTGATCTCTGCTCTGTAACGAAGCACCTCGCTAAAAAAAAAAAAAAA |
| | AAAAAAAAAA |
| SEQ ID: 558 | ATGGACGACGACGACAAGTCTCTGAACTACTCTGGTGTTAAAGAACTGTAACGAAGCACCTCGCTAAAAAAAAAAA |
| | AAAAAAAAAAAAAA |
| SEQ ID: 559 | ATGGACGACGACGACAAGTCTGTTCACTCTCTGCACATCTGGTCTCTGTAACGAAGCACCTCGCTAAAAAAAAAAA |
| | AAAAAAAAAAAAAA |
| SEQ ID: 560 | ATGGACGACGACGACAAGGTTGTTACCGGTGTTCTGGTTTACCTGTAACGAAGCACCTCGCTAAAAAAAAAAAAAA |
| | AAAAAAAAAAA |
| SEQ ID: 561 | ATGGACGACGACGACAAGTTCATCTTCTCTATCCTGGTTCTGGCTTAACGAAGCACCTCGCTAAAAAAAAAAAAAAA |
| | AAAAAAAAAA |
| SEQ ID: 562 | ATGGACGACGACGACAAGATCCAGGCTACCGTTATGATCATCGTTTAACGAAGCACCTCGCTAAAAAAAAAAAAAA |
| | AAAAAAAAAAA |
| SEQ ID: 563 | ATGGACGACGACGACAAGAAAATGTACGCTTTCACCCTGGAATCTTAACGAAGCACCTCGCTAAAAAAAAAAAAAA |
| | AAAAAAAAAAA |
| SEQ ID: 564 | ATGGACGACGACGACAAGAAATCTCTGAACTACTCTGGTGTTAAATAACGAAGCACCTCGCTAAAAAAAAAAAAAA |
| | AAAAAAAAAAA |
| SEQ ID: 565 | ATGGACGACGACGACAAGCTGGCTGTTGACGGTGTTCTGTCTGTTTAACGAAGCACCTCGCTAAAAAAAAAAAAAA |
| | AAAAAAAAAAA |
| SEQ ID: 566 | ATGGACGACGACGACAAGCTGCTGTCTCTGTTCTCTCTGTGGCTGTAACGAAGCACCTCGCTAAAAAAAAAAAAAA |
| | AAAAAAAAAAA |
| SEQ ID: 567 | ATGGACGACGACGACAAGCGTCTGCTGTACCCGGACTACCAGATCTAACGAAGCACCTCGCTAAAAAAAAAAAAA |
| | AAAAAAAAAAAA |
| SEQ ID: 568 | ATGGACGACGACGACAAGACCATGCACTCTCTGACCATCCAGATGTAACGAAGCACCTCGCTAAAAAAAAAAAAAA |
| | AAAAAAAAAAA |
| SEQ ID: 569 | ATGGACGACGACGACAAGGTTGCTGCTAACATCGTTCTGACCGTTTAACGAAGCACCTCGCTAAAAAAAAAAAAAA |
| | AAAAAAAAAAA |
| SEQ ID: 570 | ATGGACGACGACGACAAGTGCCTGGGTCACAACCACAAAGAAGTTTAACGAAGCACCTCGCTAAAAAAAAAAAAA |
| | AAAAAAAAAAAA |
| SEQ ID: 571 | ATGGACGACGACGACAAGAAAATCGCTGACCCGATCTGCACCTTCATCTAACGAAGCACCTCGCTAAAAAAAAAAA |
| | AAAAAAAAAAAAAA |
| SEQ ID: 572 | ATGGACGACGACGACAAGAAAATGTACGCTTTCACCCTGGAATCTGTTTAACGAAGCACCTCGCTAAAAAAAAAAA |
| | AAAAAAAAAAAAAA |
| SEQ ID: 573 | ATGGACGACGACGACAAGCTGCTGATCGACCTGACCTCTTTCCTGCTGTAACGAAGCACCTCGCTAAAAAAAAAAA |
| | AAAAAAAAAAAAAA |
| SEQ ID: 574 | ATGGACGACGACGACAAGCTGCTGTCTATCCTGTGCATCTGGGTTTAACGAAGCACCTCGCTAAAAAAAAAAAAAA |
| | AAAAAAAAAAA |
| SEQ ID: 575 | ATGGACGACGACGACAAGTCTCTGTACAACACCGTTGCTACCCTGTACTAACGAAGCACCTCGCTAAAAAAAAAAA |
| | AAAAAAAAAAAAAA |
| SEQ ID: 576 | ATGGACGACGACGACAAGTTCCTGGGTAAAATCTGGCCGTCTTACAAATAACGAAGCACCTCGCTAAAAAAAAAAA |
| | AAAAAAAAAAAAAA |
| SEQ ID: 577 | ATGGACGACGACGACAAGCTGGTTGGTCCGACCCCGGTTAACATCTAACGAAGCACCTCGCTAAAAAAAAAAAAA |
| | AAAAAAAAAAAA |
| SEQ ID: 578 | ATGGACGACGACGACAAGGCTCTGGTTGAAATCTGCACCGAAATGTAACGAAGCACCTCGCTAAAAAAAAAAAAA |
| | AAAAAAAAAAAA |
| SEQ ID: 579 | ATGGACGACGACGACAAGGTTATCTACCAGTACATGGACGACCTGTAACGAAGCACCTCGCTAAAAAAAAAAAAA |
| | AAAAAAAAAAAA |
| SEQ ID: 580 | ATGGACGACGACGACAAGATCCTGAAAGAACCGGTTCACGGTGTTTAACGAAGCACCTCGCTAAAAAAAAAAAAA |
| | AAAAAAAAAAAA |
| SEQ ID: 581 | ATGGACGACGACGACAAGGCTATCATCCGTATCCTGCAGCAGCTGTAACGAAGCACCTCGCTAAAAAAAAAAAAA |
| | AAAAAAAAAAAA |
| SEQ ID: 582 | ATGGACGACGACGACAAGCGTGGTCCGGGTCGTGGTTTCGTTACCATCTAACGAAGCACCTCGCTAAAAAAAAAAA |
| | AAAAAAAAAAAAAA |
| SEQ ID: 583 | ATGGACGACGACGACAAGTCTCTGCTGAACGCTACCGACATCGCTGTTTAACGAAGCACCTCGCTAAAAAAAAAAA |
| | AAAAAAAAAAAAAA |
| SEQ ID: 584 | ATGGACGACGACGACAAGCTGCTGAACGCTACCGACATCGCTGTTTAACGAAGCACCTCGCTAAAAAAAAAAAAA |
| | AAAAAAAAAAAA |
| SEQ ID: 585 | ATGGACGACGACGACAAGCCGCTGACCTTCGGTTGGTGCTACAAACTGTAACGAAGCACCTCGCTAAAAAAAAAA |
| | AAAAAAAAAAAAAAA |
| SEQ ID: 586 | ATGGACGACGACGACAAGGTTCTGGAATGGCGTTTCGACTCTCGTCTGTAACGAAGCACCTCGCTAAAAAAAAAAA |
| | AAAAAAAAAAAAAA |
| SEQ ID: 587 | ATGGACGACGACGACAAGGGTATCCTGGGTTTCGTTTTCACCCTGTAACGAAGCACCTCGCTAAAAAAAAAAAAAA |
| | AAAAAAAAAAA |
| SEQ ID: 588 | ATGGACGACGACGACAAGAAACTGTACCAGAACCCGACCACCTACATCTAACGAAGCACCTCGCTAAAAAAAAAAA |
| | AAAAAAAAAAAAAA |
| SEQ ID: 589 | ATGGACGACGACGACAAGCGTCTGTACCAGAACCCGACCACCTACATCTAACGAAGCACCTCGCTAAAAAAAAAAA |
| | AAAAAAAAAAAAAA |
| SEQ ID: 590 | ATGGACGACGACGACAAGGCTATCATGGACAAAAACATCATCCTGTAACGAAGCACCTCGCTAAAAAAAAAAAAA |
| | AAAAAAAAAAAA |
| SEQ ID: 591 | ATGGACGACGACGACAAGTTCATGTACTCTGACTTCCACTTCATCTAACGAAGCACCTCGCTAAAAAAAAAAAAAA |
| | AAAAAAAAAAA |
| SEQ ID: 592 | ATGGACGACGACGACAAGAAACTGGTTGCTCTGGGTATCAACGCTGTTTAACGAAGCACCTCGCTAAAAAAAAAAA |
| | AAAAAAAAAAAAAA |
| SEQ ID: 593 | ATGGACGACGACGACAAGCTGCTGTTCAACATCCTGGGTGGTTGGGTTTAACGAAGCACCTCGCTAAAAAAAAAAA |
| | AAAAAAAAAAAAAA |
| SEQ ID: 594 | ATGGACGACGACGACAAGTGCATCAACGGTGTTTGCTGGACCGTTTAACGAAGCACCTCGCTAAAAAAAAAAAAA |
| | AAAAAAAAAAAA |
| SEQ ID: 595 | ATGGACGACGACGACAAGTACCTGCTGCCGCGTCGTGGTCCGCGTCTGTAACGAAGCACCTCGCTAAAAAAAAAA |
| | AAAAAAAAAAAAAAA |
| SEQ ID: 596 | ATGGACGACGACGACAAGTACCTGGTTGCTCTGGGTATCAACGCTGTTTAACGAAGCACCTCGCTAAAAAAAAAAA |
| | AAAAAAAAAAAAAA |
| SEQ ID: 597 | ATGGACGACGACGACAAGTACCTGGTTGCTCTGGGTGTTAACGCTGTTTAACGAAGCACCTCGCTAAAAAAAAAAA |
| | AAAAAAAAAAAAAA |
| SEQ ID: 598 | ATGGACGACGACGACAAGAAACTGGTTGCTCTGGGTATCAACAACGTTTAACGAAGCACCTCGCTAAAAAAAAAA |
| | AAAAAAAAAAAAAAA |
| SEQ ID: 599 | ATGGACGACGACGACAAGTCTCTGGTTGCTCTGGGTATCAACGCTGTTTAACGAAGCACCTCGCTAAAAAAAAAAA |
| | AAAAAAAAAAAAAA |
| SEQ ID: 600 | ATGGACGACGACGACAAGAAAATCGTTGCTCTGGGTATCAACGCTGTTTAACGAAGCACCTCGCTAAAAAAAAAAA |
| | AAAAAAAAAAAAAA |
| SEQ ID: 601 | ATGGACGACGACGACAAGTGCCTGGGTGGTCTGCTGACCATGGTTTAACGAAGCACCTCGCTAAAAAAAAAAAAA |
| | AAAAAAAAAAAA |
| SEQ ID: 602 | ATGGACGACGACGACAAGTACCTGCAGCAGAACTGGTGGACCCTGTAACGAAGCACCTCGCTAAAAAAAAAAAAA |
| | AAAAAAAAAAAA |
| SEQ ID: 603 | ATGGACGACGACGACAAGTACCTGCTGGAAATGCTGTGGCGTCTGTAACGAAGCACCTCGCTAAAAAAAAAAAAA |
| | AAAAAAAAAAAA |
| SEQ ID: 604 | ATGGACGACGACGACAAGTACGTTCTGGACCACCTGATCGTTGTTTAACGAAGCACCTCGCTAAAAAAAAAAAAAA |
| | AAAAAAAAAAA |
| SEQ ID: 605 | ATGGACGACGACGACAAGGGICTGTGCACCCTGGTTGCTATGCTGTAACGAAGCACCTCGCTAAAAAAAAAAAAA |
| | AAAAAAAAAAAA |
| SEQ ID: 606 | ATGGACGACGACGACAAGTACCTGCTGCCGGGTTGGAAACTGTAACGAAGCACCTCGCTAAAAAAAAAAAAAAAA |
| | AAAAAAAAA |
| SEQ ID: 607 | ATGGACGACGACGACAAGTCTCTGATCTCTGGTATGTGGCTGCTGTAACGAAGCACCTCGCTAAAAAAAAAAAAAA |
| | AAAAAAAAAAA |
| SEQ ID: 608 | ATGGACGACGACGACAAGACCCTGCTGGCTAACGTTACCGCTGTTTAACGAAGCACCTCGCTAAAAAAAAAAAAAA |
| | AAAAAAAAAAA |
| SEQ ID: 609 | ATGGACGACGACGACAAGTTCCTGTACGCTCTGGCTCTGCTGCTGTAACGAAGCACCTCGCTAAAAAAAAAAAAAA |
| | AAAAAAAAAAA |
| SEQ ID: 610 | ATGGACGACGACGACAAGGAAGTTAAAGAAAAACACGAATTCCTGTAACGAAGCACCTCGCTAAAAAAAAAAAAA |
| | AAAAAAAAAAAA |
| SEQ ID: 611 | ATGGACGACGACGACAAGATCCTGATGAACGACCAGGAAGTTGGTGTTTAACGAAGCACCTCGCTAAAAAAAAAA |
| | AAAAAAAAAAAAAAA |
| SEQ ID: 612 | ATGGACGACGACGACAAGGGTATCATCTACATCATCTACAAACTGTAACGAAGCACCTCGCTAAAAAAAAAAAAAA |
| | AAAAAAAAAAA |
| SEQ ID: 613 | ATGGACGACGACGACAAGGAAGCTGCTGGTATCGGTATCCTGACCGTTTAACGAAGCACCTCGCTAAAAAAAAAA |
| | AAAAAAAAAAAAAAA |
| SEQ ID: 614 | ATGGACGACGACGACAAGGAACTGGCTGGTATCGGTATCCTGACCGTTTAACGAAGCACCTCGCTAAAAAAAAAA |
| | AAAAAAAAAAAAAAA |
| SEQ ID: 615 | ATGGACGACGACGACAAGGCTCTGGCTGGTATCGGTATCCTGACCGTTTAACGAAGCACCTCGCTAAAAAAAAAAA |
| | AAAAAAAAAAAAAA |
| SEQ ID: 616 | ATGGACGACGACGACAAGGCTGCTGGTATCGGTATCCTGACCGTTTAACGAAGCACCTCGCTAAAAAAAAAAAAA |
| | AAAAAAAAAAAA |
| SEQ ID: 617 | ATGGACGACGACGACAAGGCTCTGGGTATCGGTATCCTGACCGTTTAACGAAGCACCTCGCTAAAAAAAAAAAAA |
| | AAAAAAAAAAAA |
| SEQ ID: 618 | ATGGACGACGACGACAAGCTGCTGGCTGGTATCGGTACCGTTCCGATCTAACGAAGCACCTCGCTAAAAAAAAAAA |
| | AAAAAAAAAAAAAA |
| SEQ ID: 619 | ATGGACGACGACGACAAGTGCACCTCTATCTGCTCTCTGTACTAACGAAGCACCTCGCTAAAAAAAAAAAAAAAAA |
| | AAAAAAAA |
| SEQ ID: 620 | ATGGACGACGACGACAAGTGCGGTTCTCACCTGGTTGAAGCTCTGTACTAACGAAGCACCTCGCTAAAAAAAAAAA |
| | AAAAAAAAAAAAAA |
| SEQ ID: 621 | ATGGACGACGACGACAAGGGTTCTCACCTGGTTGAAGCTCTGTACTAACGAAGCACCTCGCTAAAAAAAAAAAAAA |
| | AAAAAAAAAAA |
| SEQ ID: 622 | ATGGACGACGACGACAAGTGCCTGGAACTGGCTGAATACCTGTACTAACGAAGCACCTCGCTAAAAAAAAAAAAA |
| | AAAAAAAAAAAA |
| SEQ ID: 623 | ATGGACGACGACGACAAGTCTACCGCTAACACCAACATGTTCACCTACTAACGAAGCACCTCGCTAAAAAAAAAAA |
| | AAAAAAAAAAAAAA |
| SEQ ID: 624 | ATGGACGACGACGACAAGAAATGCCTGGAACTGGCTGAATACCTGTACTAACGAAGCACCTCGCTAAAAAAAAAA |
| | AAAAAAAAAAAAAAA |
| SEQ ID: 625 | ATGGACGACGACGACAAGCAGCAGGACAAACACTACGACCTGTCTTACTAACGAAGCACCTCGCTAAAAAAAAAA |
| | AAAAAAAAAAAAAAA |
| SEQ ID: 626 | ATGGACGACGACGACAAGGTTTCTGCTACCGCTGGTACCACCGTTTACTAACGAAGCACCTCGCTAAAAAAAAAAA |
| | AAAAAAAAAAAAAA |
| SEQ ID: 627 | ATGGACGACGACGACAAGTCTACCAAAGTTATCGACTTCCACTACTAACGAAGCACCTCGCTAAAAAAAAAAAAAA |
| | AAAAAAAAAAA |
| SEQ ID: 628 | ATGGACGACGACGACAAGTACCTGGCTTGCGAACGTCTGCTGTACTAACGAAGCACCTCGCTAAAAAAAAAAAAA |
| | AAAAAAAAAAAA |
| SEQ ID: 629 | ATGGACGACGACGACAAGGITACCGACGCTGCTCACCTGCTGATCTAACGAAGCACCTCGCTAAAAAAAAAAAAAA |
| | AAAAAAAAAAA |
| SEQ ID: 630 | ATGGACGACGACGACAAGCCGACCGAAAAAGGTGCTAACGAATACTAACGAAGCACCTCGCTAAAAAAAAAAAAA |
| | AAAAAAAAAAAA |
| SEQ ID: 631 | ATGGACGACGACGACAAGCTGATCGACCTGACCTCTTTCCTGCTGTAACGAAGCACCTCGCTAAAAAAAAAAAAAA |
| | AAAAAAAAAAA |
| SEQ ID: 632 | ATGGACGACGACGACAAGAAACCGACCGAAAAAGGTGCTAACGAATACTAACGAAGCACCTCGCTAAAAAAAAAA |
| | AAAAAAAAAAAAAAA |
| SEQ ID: 633 | ATGGACGACGACGACAAGGTTGTTACCGACGCTGCTCACCTGCTGATCTAACGAAGCACCTCGCTAAAAAAAAAAA |
| | AAAAAAAAAAAAAA |
| SEQ ID: 634 | ATGGACGACGACGACAAGCTGACGTCTTTTCCTGCTGTCTCTGTTCTAACGAAGCACCTCGCTAAAAAAAAAAAAAAA |
| | AAAAAAAAAA |
| SEQ ID: 635 | ATGGACGACGACGACAAGTCTACCAACGTTGGTTCTAACACCTACTAACGAAGCACCTCGCTAAAAAAAAAAAAAA |
| | AAAAAAAAAAA |
| SEQ ID: 636 | ATGGACGACGACGACAAGTCTTCTACCAACGTTGGTTCTAACACCTACTAACGAAGCACCTCGCTAAAAAAAAAAA |
| | AAAAAAAAAAAAAA |
| SEQ ID: 637 | ATGGACGACGACGACAAGCTGACCTCTCTGACCATCCTGCAGCTGTACTAACGAAGCACCTCGCTAAAAAAAAAAA |
| | AAAAAAAAAAAAAA |
| SEQ ID: 638 | ATGGACGACGACGACAAGCCGACCCACGAAGAACACCTGTTCTACTAACGAAGCACCTCGCTAAAAAAAAAAAAA |
| | AAAAAAAAAAAA |
| SEQ ID: 639 | ATGGACGACGACGACAAGATCCCGACCCACGAAGAACACCTGTTCTACTAACGAAGCACCTCGCTAAAAAAAAAAA |
| | AAAAAAAAAAAAAA |
| SEQ ID: 640 | ATGGACGACGACGACAAGACCTCTCTGACCATCCTGCAGCTGTACTAACGAAGCACCTCGCTAAAAAAAAAAAAAA |
| | AAAAAAAAAAA |
| SEQ ID: 641 | ATGGACGACGACGACAAGTCTACCGGTCACATGATCCTGGCTTACTAACGAAGCACCTCGCTAAAAAAAAAAAAAA |
| | AAAAAAAAAAA |
| SEQ ID: 642 | ATGGACGACGACGACAAGTTCGGTGACCACCCGGGTCACTCTTACTAACGAAGCACCTCGCTAAAAAAAAAAAAAA |
| | AAAAAAAAAAA |
| SEQ ID: 643 | ATGGACGACGACGACAAGATCTCTACCGGTCACATGATCCTGGCTTACTAACGAAGCACCTCGCTAAAAAAAAAAA |
| | AAAAAAAAAAAAAA |
| SEQ ID: 644 | ATGGACGACGACGACAAGTTCCAGGACTCTGGTCTGCTGTACTAACGAAGCACCTCGCTAAAAAAAAAAAAAAAA |
| | AAAAAAAAA |
| SEQ ID: 645 | ATGGACGACGACGACAAGCAGCTGTTCCAGGACTCTGGTCTGCTGTACTAACGAAGCACCTCGCTAAAAAAAAAAA |
| | AAAAAAAAAAAAAA |
| SEQ ID: 646 | ATGGACGACGACGACAAGCTGTCTTGGCACGACGACCTGACCCAGTACTAACGAAGCACCTCGCTAAAAAAAAAA |
| | AAAAAAAAAAAAAAA |
| SEQ ID: 647 | ATGGACGACGACGACAAGTGGCCGGACGAAGGTGCTTCTCTGTACTAACGAAGCACCTCGCTAAAAAAAAAAAAA |
| | AAAAAAAAAAAA |
| SEQ ID: 648 | ATGGACGACGACGACAAGGCTCTGGACATCGAAATCGCTACCTACTAACGAAGCACCTCGCTAAAAAAAAAAAAA |
| | AAAAAAAAAAAA |
| SEQ ID: 649 | ATGGACGACGACGACAAGCTGGCTCTGGACATCGAAATCGCTACCTACTAACGAAGCACCTCGCTAAAAAAAAAAA |
| | AAAAAAAAAAAAAA |
| SEQ ID: 650 | ATGGACGACGACGACAAGGTTTGCGGTGAACGTGGTTTCTTCTACACCTAACGAAGCACCTCGCTAAAAAAAAAAA |
| | AAAAAAAAAAAAAA |
| SEQ ID: 651 | ATGGACGACGACGACAAGGGTGAACGTGGTTTCTTCTACACCTAACGAAGCACCTCGCTAAAAAAAAAAAAAAAA |
| | AAAAAAAAA |
| SEQ ID: 652 | ATGGACGACGACGACAAGCTGGTTTGCGGTGAACGTGGTTTCTTCTACTAACGAAGCACCTCGCTAAAAAAAAAAA |
| | AAAAAAAAAAAAAA |
| SEQ ID: 653 | ATGGACGACGACGACAAGGCTCTGTGGGGTCCGGACCCGGCTGCTGCTTTCTAACGAAGCACCTCGCTAAAAAAA |
| | AAAAAAAAAAAAAAAAAA |
| SEQ ID: 654 | ATGGACGACGACGACAAGTGCACCGAACTGAAACTGTCTGACTACTAACGAAGCACCTCGCTAAAAAAAAAAAAA |
| | AAAAAAAAAAAA |
| SEQ ID: 655 | ATGGACGACGACGACAAGCACTCTAACCTGAACGACGCTACCTACTAACGAAGCACCTCGCTAAAAAAAAAAAAAA |
| | AAAAAAAAAAA |
| SEQ ID: 656 | ATGGACGACGACGACAAGAAATCTTGCCTGCCGGCTTGCGTTTACTAACGAAGCACCTCGCTAAAAAAAAAAAAAA |
| | AAAAAAAAAAA |
| SEQ ID: 657 | ATGGACGACGACGACAAGCTGGTTTCTGACGGTGGTCCGAACCTGTACTAACGAAGCACCTCGCTAAAAAAAAAA |
| | AAAAAAAAAAAAAAA |
| SEQ ID: 658 | ATGGACGACGACGACAAGGTTTCTGACGGTGGTCCGAACCTGTACTAACGAAGCACCTCGCTAAAAAAAAAAAAA |
| | AAAAAAAAAAAA |
| SEQ ID: 659 | ATGGACGACGACGACAAGGCTCTGGCTTCTTGCATGGGTCTGATCTACTAACGAAGCACCTCGCTAAAAAAAAAAA |
| | AAAAAAAAAAAAAA |
| SEQ ID: 660 | ATGGACGACGACGACAAGGGTTCTGAAGAACTGCGTTCTCTGTACTAACGAAGCACCTCGCTAAAAAAAAAAAAA |
| | AAAAAAAAAAAA |
| SEQ ID: 661 | ATGGACGACGACGACAAGTTCCGTGACTACGTTGACCGTTTCTACTAACGAAGCACCTCGCTAAAAAAAAAAAAAA |
| | AAAAAAAAAAA |
| SEQ ID: 662 | ATGGACGACGACGACAAGCAGCGTCCGCTGGTTACCATCAAAATCTAACGAAGCACCTCGCTAAAAAAAAAAAAA |
| | AAAAAAAAAAAA |
| SEQ ID: 663 | ATGGACGACGACGACAAGATCTCTGAACGTATCCTGTCTACCTACTAACGAAGCACCTCGCTAAAAAAAAAAAAAA |
| | AAAAAAAAAAA |
| SEQ ID: 664 | ATGGACGACGACGACAAGCGTCGTGGTTGGGAAGTTCTGAAATACTAACGAAGCACCTCGCTAAAAAAAAAAAAA |
| | AAAAAAAAAAAA |
| SEQ ID: 665 | ATGGACGACGACGACAAGATGGCTCTGTGGATGCGTCTGCTGCCGCTGTAACGAAGCACCTCGCTAAAAAAAAAA |
| | AAAAAAAAAAAAAAA |
| SEQ ID: 666 | ATGGACGACGACGACAAGTGGATGCGTCTGCTGCCGCTGCTGGCTCTGTAACGAAGCACCTCGCTAAAAAAAAAA |
| | AAAAAAAAAAAAAAA |
| SEQ ID: 667 | ATGGACGACGACGACAAGTGGATGCGTCTGCTGCCGCTGCTGTAACGAAGCACCTCGCTAAAAAAAAAAAAAAAA |
| | AAAAAAAAA |
| SEQ ID: 668 | ATGGACGACGACGACAAGCTGTGGATGCGTCTGCTGCCGCTGTAACGAAGCACCTCGCTAAAAAAAAAAAAAAAA |
| | AAAAAAAAA |
| SEQ ID: 669 | ATGGACGACGACGACAAGTCTCTGCAGAAACGTGGTATCGTTTAACGAAGCACCTCGCTAAAAAAAAAAAAAAAA |
| | AAAAAAAAA |
| SEQ ID: 670 | ATGGACGACGACGACAAGATGGCTCTGTGGATGCGTCTGCTGTAACGAAGCACCTCGCTAAAAAAAAAAAAAAAA |
| | AAAAAAAAA |
| SEQ ID: 671 | ATGGACGACGACGACAAGATGATGATCGCTCGTTTCAAAATGTAACGAAGCACCTCGCTAAAAAAAAAAAAAAAA |
| | AAAAAAAAA |
| SEQ ID: 672 | ATGGACGACGACGACAAGATGATGATCGCTCGTTTCAAAATGTTCTAACGAAGCACCTCGCTAAAAAAAAAAAAAA |
| | AAAAAAAAAAA |
| SEQ ID: 673 | ATGGACGACGACGACAAGATGTCTCGTAAACACAAATGGAAACTGTAACGAAGCACCTCGCTAAAAAAAAAAAAA |
| | AAAAAAAAAAAA |
| SEQ ID: 674 | ATGGACGACGACGACAAGCTGATGTCTCGTAAACACAAATGGAAACTGTAACGAAGCACCTCGCTAAAAAAAAAA |
| | AAAAAAAAAAAAAAA |
| SEQ ID: 675 | ATGGACGACGACGACAAGTCTCTGAAAAAAGGTGCTGCTGCTCTGTAACGAAGCACCTCGCTAAAAAAAAAAAAA |
| | AAAAAAAAAAAA |
| SEQ ID: 676 | ATGGACGACGACGACAAGTTCTCTCTGAAAAAAGGTGCTGCTGCTCTGTAACGAAGCACCTCGCTAAAAAAAAAAA |
| | AAAAAAAAAAAAAA |
| SEQ ID: 677 | ATGGACGACGACGACAAGCACCCGCGTTACTTCAACCAGCTGTAACGAAGCACCTCGCTAAAAAAAAAAAAAAAA |
| | AAAAAAAAA |
| SEQ ID: 678 | ATGGACGACGACGACAAGCTGATGCACTGCCAGACCACCCTGTAACGAAGCACCTCGCTAAAAAAAAAAAAAAAA |
| | AAAAAAAAA |
| SEQ ID: 679 | ATGGACGACGACGACAAGGCTATGATGATCGCTCGTTTCAAAATGTTCTAACGAAGCACCTCGCTAAAAAAAAAAA |
| | AAAAAAAAAAAAAA |
| SEQ ID: 680 | ATGGACGACGACGACAAGATGTCTCGTCTGTCTAAAGTTGCTCCGGTTTAACGAAGCACCTCGCTAAAAAAAAAAA |
| | AAAAAAAAAAAAAA |
| SEQ ID: 681 | ATGGACGACGACGACAAGATGGCTGCTCTGCCGCGTCTGATCGGTTTCTAACGAAGCACCTCGCTAAAAAAAAAAA |
| | AAAAAAAAAAAAAA |
| SEQ ID: 682 | ATGGACGACGACGACAAGATGATCGCTCGTTTCAAAATGTTCTAACGAAGCACCTCGCTAAAAAAAAAAAAAAAAA |
| | AAAAAAAA |
| SEQ ID: 683 | ATGGACGACGACGACAAGACCCTGAAAAAAATGCGTGAAATCTAACGAAGCACCTCGCTAAAAAAAAAAAAAAAA |
| | AAAAAAAAA |
| SEQ ID: 684 | ATGGACGACGACGACAAGGAAGCTAAACAGAAAGGTTTCGTTCCGTTCTAACGAAGCACCTCGCTAAAAAAAAAA |
| | AAAAAAAAAAAAAAA |
| SEQ ID: 685 | ATGGACGACGACGACAAGCGTATGATGGAATACGGTACCACCATGTAACGAAGCACCTCGCTAAAAAAAAAAAAA |
| | AAAAAAAAAAAA |
| SEQ ID: 686 | ATGGACGACGACGACAAGGAAGTTAAAGAAAAAGGTATGGCTGCTCTGTAACGAAGCACCTCGCTAAAAAAAAAA |
| | AAAAAAAAAAAAAAA |
| SEQ ID: 687 | ATGGACGACGACGACAAGGAAGTTAAAGAAAAAGGTATGGCTGCTTAACGAAGCACCTCGCTAAAAAAAAAAAAA |
| | AAAAAAAAAAAA |
| SEQ ID: 688 | ATGGACGACGACGACAAGTACGCTATGATGATCGCTCGTTTCAAAATGTAACGAAGCACCTCGCTAAAAAAAAAAA |
| | AAAAAAAAAAAAAA |
| SEQ ID: 689 | ATGGACGACGACGACAAGAACCCGCACAAAATGATGGGTGTTCCGCTGTAACGAAGCACCTCGCTAAAAAAAAAA |
| | AAAAAAAAAAAAAAA |
| SEQ ID: 690 | ATGGACGACGACGACAAGTCTCGTAAACACAAATGGAAACTGTAACGAAGCACCTCGCTAAAAAAAAAAAAAAAA |
| | AAAAAAAAA |
| SEQ ID: 691 | ATGGACGACGACGACAAGTTCCAGCAGGACAAACACTACGACCTGTAACGAAGCACCTCGCTAAAAAAAAAAAAA |
| | AAAAAAAAAAAA |
| SEQ ID: 692 | ATGGACGACGACGACAAGTACGCTTTCCTGCACGCTACCGACCTGTAACGAAGCACCTCGCTAAAAAAAAAAAAAA |
| | AAAAAAAAAAA |
| SEQ ID: 693 | ATGGACGACGACGACAAGTTCTCTCTGAAAAAAGGTGCTGCTGCTTAACGAAGCACCTCGCTAAAAAAAAAAAAAA |
| | AAAAAAAAAAA |
| SEQ ID: 694 | ATGGACGACGACGACAAGTCTCTGAAAAAAGGTGCTGCTGCTTAACGAAGCACCTCGCTAAAAAAAAAAAAAAAA |
| | AAAAAAAAA |
| SEQ ID: 695 | ATGGACGACGACGACAAGACCCTGAAAAAAATGCGTGAAATCATCTAACGAAGCACCTCGCTAAAAAAAAAAAAA |
| | AAAAAAAAAAAA |
| SEQ ID: 696 | ATGGACGACGACGACAAGGAACGTATGTCTCGTCTGTCTAAAGTTTAACGAAGCACCTCGCTAAAAAAAAAAAAAA |
| | AAAAAAAAAAA |
| SEQ ID: 697 | ATGGACGACGACGACAAGTACGCTAAATGGAAACTGTGCTCTGCTTAACGAAGCACCTCGCTAAAAAAAAAAAAA |
| | AAAAAAAAAAAA |
| SEQ ID: 698 | ATGGACGACGACGACAAGGCTGCTAAAATGTACGCTTTCACCCTGTAACGAAGCACCTCGCTAAAAAAAAAAAAAA |
| | AAAAAAAAAAA |
| SEQ ID: 699 | ATGGACGACGACGACAAGTGCCCGCGTGAACGTCCGGAAGAACTGTAACGAAGCACCTCGCTAAAAAAAAAAAAA |
| | AAAAAAAAAAAA |
| SEQ ID: 700 | ATGGACGACGACGACAAGTACGCTTACGCTAAATGGAAACTGTAACGAAGCACCTCGCTAAAAAAAAAAAAAAAA |
| | AAAAAAAAA |
| SEQ ID: 701 | ATGGACGACGACGACAAGTTCCTGCTGTCTCTGTTCTCTCTGTAACGAAGCACCTCGCTAAAAAAAAAAAAAAAAA |
| | AAAAAAAA |
| SEQ ID: 702 | ATGGACGACGACGACAAGTCTGTTCGTGCTGCTTTCGTTCACGCTCTGTAACGAAGCACCTCGCTAAAAAAAAAAA |
| | AAAAAAAAAAAAAA |
| SEQ ID: 703 | ATGGACGACGACGACAAGAACGCTTCTGTTCGTGCTGCTTTCTAACGAAGCACCTCGCTAAAAAAAAAAAAAAAAA |
| | AAAAAAAA |
| SEQ ID: 704 | ATGGACGACGACGACAAGCACTCTCTGCACATCTGGTCTCTGTAACGAAGCACCTCGCTAAAAAAAAAAAAAAAAA |
| | AAAAAAAA |
| SEQ ID: 705 | ATGGACGACGACGACAAGGAAGTTCTGAAACGTGAACCGCTGTAACGAAGCACCTCGCTAAAAAAAAAAAAAAAA |
| | AAAAAAAAA |
| SEQ ID: 706 | ATGGACGACGACGACAAGCTGAACCACCTGAAAGCTACCCCGATCTAACGAAGCACCTCGCTAAAAAAAAAAAAA |
| | AAAAAAAAAAAA |
| SEQ ID: 707 | ATGGACGACGACGACAAGATCCTGAAACTGCAGGTTTTCCTGTAACGAAGCACCTCGCTAAAAAAAAAAAAAAAAA |
| | AAAAAAAA |
| SEQ ID: 708 | ATGGACGACGACGACAAGATGGGTATCCTGAAACTGCAGGTTTTCTAACGAAGCACCTCGCTAAAAAAAAAAAAA |
| | AAAAAAAAAAAA |
| SEQ ID: 709 | ATGGACGACGACGACAAGATGGGTATCCTGAAACTGCAGGTTTTCCTGTAACGAAGCACCTCGCTAAAAAAAAAAA |
| | AAAAAAAAAAAAAA |
| SEQ ID: 710 | ATGGACGACGACGACAAGAACACCTACGGTAAACGTAACGCTGTTTAACGAAGCACCTCGCTAAAAAAAAAAAAA |
| | AAAAAAAAAAAA |
| SEQ ID: 711 | ATGGACGACGACGACAAGTTCCTGCACCGTAACGGTGTTCTGTAACGAAGCACCTCGCTAAAAAAAAAAAAAAAA |
| | AAAAAAAAA |
| SEQ ID: 712 | ATGGACGACGACGACAAGTACCTGAAAACCAACCTGTTCCTGTAACGAAGCACCTCGCTAAAAAAAAAAAAAAAAA |
| | AAAAAAAA |
| SEQ ID: 713 | ATGGACGACGACGACAAGAACCTGATCTTCAAATGGATCCTGTAACGAAGCACCTCGCTAAAAAAAAAAAAAAAA |
| | AAAAAAAAA |
| SEQ ID: 714 | ATGGACGACGACGACAAGTACGTTATGGTTACCGCTGCTCTGTAACGAAGCACCTCGCTAAAAAAAAAAAAAAAAA |
| | AAAAAAAA |
| SEQ ID: 715 | ATGGACGACGACGACAAGACCCTGTCTTTCCGTCTGCTGTGCGCTCTGTAACGAAGCACCTCGCTAAAAAAAAAAA |
| | AAAAAAAAAAAAAA |
| SEQ ID: 716 | ATGGACGACGACGACAAGTACCTGAAAACCAACCTGTTCCTGTTCCTGTAACGAAGCACCTCGCTAAAAAAAAAAA |
| | AAAAAAAAAAAAAA |
| SEQ ID: 717 | ATGGACGACGACGACAAGTACCTGAAAACCAACCTGTTCCTGTTCTAACGAAGCACCTCGCTAAAAAAAAAAAAAA |
| | AAAAAAAAAAA |
| SEQ ID: 718 | ATGGACGACGACGACAAGTCTTTCCGTCTGCTGTGCGCTCTGTAACGAAGCACCTCGCTAAAAAAAAAAAAAAAAA |
| | AAAAAAAA |
| SEQ ID: 719 | ATGGACGACGACGACAAGACCCTGCACCGTCTGACCTGGTCTTTCTAACGAAGCACCTCGCTAAAAAAAAAAAAAA |
| | AAAAAAAAAAA |
| SEQ ID: 720 | ATGGACGACGACGACAAGTGCGGTATGGACAAATTCTCTATCACCCTGTAACGAAGCACCTCGCTAAAAAAAAAAA |
| | AAAAAAAAAAAAAA |
| SEQ ID: 721 | ATGGACGACGACGACAAGTGCGGTATGGACAAATTCTCTATCTAACGAAGCACCTCGCTAAAAAAAAAAAAAAAA |
| | AAAAAAAAA |
| SEQ ID: 722 | ATGGACGACGACGACAAGAACCTGATCTTCAAATGGAAATCTATCTAACGAAGCACCTCGCTAAAAAAAAAAAAAA |
| | AAAAAAAAAAA |
| SEQ ID: 723 | ATGGACGACGACGACAAGTGGCCGTGCAACGGTCGTATCCTGTGCCTGTAACGAAGCACCTCGCTAAAAAAAAAA |
| | AAAAAAAAAAAAAAA |
| SEQ ID: 724 | ATGGACGACGACGACAAGGTTCTGCTGGAAAAAAAATCTCCGCTGTAACGAAGCACCTCGCTAAAAAAAAAAAAA |
| | AAAAAAAAAAAA |
| SEQ ID: 725 | ATGGACGACGACGACAAGTTCCTGGTTCGTTCTTTCTACCTGTAACGAAGCACCTCGCTAAAAAAAAAAAAAAAAA |
| | AAAAAAAA |
| SEQ ID: 726 | ATGGACGACGACGACAAGCACCTGCGTAACCGTGACCGTCTGTAACGAAGCACCTCGCTAAAAAAAAAAAAAAAA |
| | AAAAAAAAA |
| SEQ ID: 727 | ATGGACGACGACGACAAGTCTCCGATGCGTTCTGTTCTGCTGTAACGAAGCACCTCGCTAAAAAAAAAAAAAAAAA |
| | AAAAAAAA |
| SEQ ID: 728 | ATGGACGACGACGACAAGGCTGCTCTGCAGCGTCTGGCTGCTGTTTAACGAAGCACCTCGCTAAAAAAAAAAAAA |
| | AAAAAAAAAAAA |
| SEQ ID: 729 | ATGGACGACGACGACAAGCTGCCGGCTCGTACCTCTCCGATGTAACGAAGCACCTCGCTAAAAAAAAAAAAAAAA |
| | AAAAAAAAA |
| SEQ ID: 730 | ATGGACGACGACGACAAGCTGCTGGAAAAAAAATCTCCGCTGTAACGAAGCACCTCGCTAAAAAAAAAAAAAAAA |
| | AAAAAAAAA |
| SEQ ID: 731 | ATGGACGACGACGACAAGGACAAAGAACGTCTGGCTGCTCTGTAACGAAGCACCTCGCTAAAAAAAAAAAAAAAA |
| | AAAAAAAAA |
| SEQ ID: 732 | ATGGACGACGACGACAAGCACGCTCGTATCAAACTGAAAGTTTAACGAAGCACCTCGCTAAAAAAAAAAAAAAAA |
| | AAAAAAAAA |
| SEQ ID: 733 | ATGGACGACGACGACAAGTACCGTGGTCGTTCTTGCCCGATCTAACGAAGCACCTCGCTAAAAAAAAAAAAAAAAA |
| | AAAAAAAA |
| SEQ ID: 734 | ATGGACGACGACGACAAGCAGCAGGACAAAGAACGTCTGGCTGCTCTGTAACGAAGCACCTCGCTAAAAAAAAAA |
| | AAAAAAAAAAAAAAA |
| SEQ ID: 735 | ATGGACGACGACGACAAGGAACTGCCGGCTCGTACCTCTCCGATGTAACGAAGCACCTCGCTAAAAAAAAAAAAA |
| | AAAAAAAAAAAA |
| SEQ ID: 736 | ATGGACGACGACGACAAGTGCTACCGTGGTCGTTCTTGCCCGATCTAACGAAGCACCTCGCTAAAAAAAAAAAAAA |
| | AAAAAAAAAAA |
| SEQ ID: 737 | ATGGACGACGACGACAAGCGTCCGCGTGACCGTTCTGGTCTGTAACGAAGCACCTCGCTAAAAAAAAAAAAAAAA |
| | AAAAAAAAA |
| SEQ ID: 738 | ATGGACGACGACGACAAGTCTCCGATGCGTTCTGTTCTGCTGACCCTGTAACGAAGCACCTCGCTAAAAAAAAAAA |
| | AAAAAAAAAAAAAA |
| SEQ ID: 739 | ATGGACGACGACGACAAGGCTCTGCAGCGTCTGGCTGCTGTTTAACGAAGCACCTCGCTAAAAAAAAAAAAAAAA |
| | AAAAAAAAA |
| SEQ ID: 740 | ATGGACGACGACGACAAGGCTGCTCTGCAGCGTCTGGCTGCTGTTCTGTAACGAAGCACCTCGCTAAAAAAAAAAA |
| | AAAAAAAAAAAAAA |
| SEQ ID: 741 | ATGGACGACGACGACAAGCACCTGCGTAACCGTGACCGTCTGGCTTAACGAAGCACCTCGCTAAAAAAAAAAAAA |
| | AAAAAAAAAAAA |
| SEQ ID: 742 | ATGGACGACGACGACAAGCTGGCTAAAGAATGGCAGGCTCTGTAACGAAGCACCTCGCTAAAAAAAAAAAAAAAA |
| | AAAAAAAAA |
| SEQ ID: 743 | ATGGACGACGACGACAAGCAGGACAAAGAACGTCTGGCTGCTCTGTAACGAAGCACCTCGCTAAAAAAAAAAAAA |
| | AAAAAAAAAAAA |
| SEQ ID: 744 | ATGGACGACGACGACAAGAACCTGCAGATCCGTGAAACCTCTCTGTAACGAAGCACCTCGCTAAAAAAAAAAAAA |
| | AAAAAAAAAAAA |
| SEQ ID: 745 | ATGGACGACGACGACAAGCTGCTGAACGTTAAACTGGCTCTGTAACGAAGCACCTCGCTAAAAAAAAAAAAAAAA |
| | AAAAAAAAA |
| SEQ ID: 746 | ATGGACGACGACGACAAGGAACTGCGTCTGCGTCTGGACCAGCTGTAACGAAGCACCTCGCTAAAAAAAAAAAAA |
| | AAAAAAAAAAAA |
| SEQ ID: 747 | ATGGACGACGACGACAAGATGGAACGTCGTCGTATCACCTCTGCTTAACGAAGCACCTCGCTAAAAAAAAAAAAAA |
| | AAAAAAAAAAA |
| SEQ ID: 748 | ATGGACGACGACGACAAGTGGTACCGTTCTAAATTCGCTGACCTGTAACGAAGCACCTCGCTAAAAAAAAAAAAAA |
| | AAAAAAAAAAA |
| SEQ ID: 749 | ATGGACGACGACGACAAGCACCTGAAACGTAACATCGTTGTTTAACGAAGCACCTCGCTAAAAAAAAAAAAAAAA |
| | AAAAAAAAA |
| SEQ ID: 750 | ATGGACGACGACGACAAGTACCGTCGTCAGCTGCAGTCTCTGTAACGAAGCACCTCGCTAAAAAAAAAAAAAAAA |
| | AAAAAAAAA |
| SEQ ID: 751 | ATGGACGACGACGACAAGTACCGTTCTAAATTCGCTGACCTGTAACGAAGCACCTCGCTAAAAAAAAAAAAAAAAA |
| | AAAAAAAA |
| SEQ ID: 752 | ATGGACGACGACGACAAGTCTAACCTGCAGATCCGTGAAACCTCTCTGTAACGAAGCACCTCGCTAAAAAAAAAAA |
| | AAAAAAAAAAAAAA |
| SEQ ID: 753 | ATGGACGACGACGACAAGGAACTGCGTGAACTGCGTCTGCGTCTGTAACGAAGCACCTCGCTAAAAAAAAAAAAA |
| | AAAAAAAAAAAA |
| SEQ ID: 754 | ATGGACGACGACGACAAGGACTACCGTCGTCAGCTGCAGTCTCTGTAACGAAGCACCTCGCTAAAAAAAAAAAAA |
| | AAAAAAAAAAAA |
| SEQ ID: 755 | ATGGACGACGACGACAAGTCTGCTGCTCGTCGTTCTTACGTTTAACGAAGCACCTCGCTAAAAAAAAAAAAAAAAA |
| | AAAAAAAA |
| SEQ ID: 756 | ATGGACGACGACGACAAGGAAGGTCACCTGAAACGTAACATCGTTTAACGAAGCACCTCGCTAAAAAAAAAAAAA |
| | AAAAAAAAAAAA |
| SEQ ID: 757 | ATGGACGACGACGACAAGATGGAACGTCGTCGTATCACCTCTGCTGCTTAACGAAGCACCTCGCTAAAAAAAAAAA |
| | AAAAAAAAAAAAAA |
| SEQ ID: 758 | ATGGACGACGACGACAAGCTGCGTCTGCGTCTGGACCAGCTGTAACGAAGCACCTCGCTAAAAAAAAAAAAAAAA |
| | AAAAAAAAA |
| SEQ ID: 759 | ATGGACGACGACGACAAGGACCTGGAACGTAAAATCGAATCTCTGTAACGAAGCACCTCGCTAAAAAAAAAAAAA |
| | AAAAAAAAAAAA |
| SEQ ID: 760 | ATGGACGACGACGACAAGCTGCAGATCCGTGAAACCTCTCTGTAACGAAGCACCTCGCTAAAAAAAAAAAAAAAA |
| | AAAAAAAAA |
| SEQ ID: 761 | ATGGACGACGACGACAAGCGTGAACTGCGTCTGCGTCTGGACCAGCTGTAACGAAGCACCTCGCTAAAAAAAAAA |
| | AAAAAAAAAAAAAAA |
| SEQ ID: 762 | ATGGACGACGACGACAAGCTGGCTCGTATGCCGCCGCCGCTGTAACGAAGCACCTCGCTAAAAAAAAAAAAAAAA |
| | AAAAAAAAA |
| SEQ ID: 763 | ATGGACGACGACGACAAGGAAATCCGTACCCAGTACGAAGCTATGTAACGAAGCACCTCGCTAAAAAAAAAAAAA |
| | AAAAAAAAAAAA |
| SEQ ID: 764 | ATGGACGACGACGACAAGGGTCCGGGTACCCGTCTGTCTCTGTAACGAAGCACCTCGCTAAAAAAAAAAAAAAAA |
| | AAAAAAAAA |
| SEQ ID: 765 | ATGGACGACGACGACAAGGCTGACCGTGGTCTGCTGCGTGACATCTAACGAAGCACCTCGCTAAAAAAAAAAAAA |
| | AAAAAAAAAAAA |
| SEQ ID: 766 | ATGGACGACGACGACAAGGCTCTGAAATGCAAAGGTTTCCACGTTTAACGAAGCACCTCGCTAAAAAAAAAAAAA |
| | AAAAAAAAAAAA |
| SEQ ID: 767 | ATGGACGACGACGACAAGGAACTGCGTTCTCGTTACTGGGCTATCTAACGAAGCACCTCGCTAAAAAAAAAAAAAA |
| | AAAAAAAAAAA |
| SEQ ID: 768 | ATGGACGACGACGACAAGATCCTGAAAGGTAAATTCCAGACCGCTTAACGAAGCACCTCGCTAAAAAAAAAAAAA |
| | AAAAAAAAAAAA |
| SEQ ID: 769 | ATGGACGACGACGACAAGCGTCCGATCATCCGTCCGGCTACCCTGTAACGAAGCACCTCGCTAAAAAAAAAAAAAA |
| | AAAAAAAAAAA |
| SEQ ID: 770 | ATGGACGACGACGACAAGGAACTGCGTTCTCTGTACAACACCGTTTAACGAAGCACCTCGCTAAAAAAAAAAAAAA |
| | AAAAAAAAAAA |
| SEQ ID: 771 | ATGGACGACGACGACAAGGAAATCTACAAACGTTGGATCATCTAACGAAGCACCTCGCTAAAAAAAAAAAAAAAA |
| | AAAAAAAAA |
| SEQ ID: 772 | ATGGACGACGACGACAAGCGTGTTAAAGAAAAATACCAGCACCTGTAACGAAGCACCTCGCTAAAAAAAAAAAAA |
| | AAAAAAAAAAAA |
| SEQ ID: 773 | ATGGACGACGACGACAAGTACCTGAAAGACCAGCAGCTGCTGTAACGAAGCACCTCGCTAAAAAAAAAAAAAAAA |
| | AAAAAAAAA |
| SEQ ID: 774 | ATGGACGACGACGACAAGTGGCCGACCGTTCGTGAACGTATGTAACGAAGCACCTCGCTAAAAAAAAAAAAAAAA |
| | AAAAAAAAA |
| SEQ ID: 775 | ATGGACGACGACGACAAGTTCCTGAAAGAAAAAGGTGGTCTGTAACGAAGCACCTCGCTAAAAAAAAAAAAAAAA |
| | AAAAAAAAA |
| SEQ ID: 776 | ATGGACGACGACGACAAGGGTCCGAAAGTTAAACAGTGGCCGCTGTAACGAAGCACCTCGCTAAAAAAAAAAAAA |
| | AAAAAAAAAAAA |
| SEQ ID: 777 | ATGGACGACGACGACAAGTTCCTGCGTGGTCGTGCTTACGGTCTGTAACGAAGCACCTCGCTAAAAAAAAAAAAAA |
| | AAAAAAAAAAA |
| SEQ ID: 778 | ATGGACGACGACGACAAGCGTGCTAAATTCAAACAGCTGCTGTAACGAAGCACCTCGCTAAAAAAAAAAAAAAAA |
| | AAAAAAAAA |
| SEQ ID: 779 | ATGGACGACGACGACAAGCAGGCTAAATG |
| | AAAAAAAAAAAA |
| SEQ ID: 780 | ATGGACGACGACGACAAGTGCCCGCTGTCTAAAATCCTGCTGTAACGAAGCACCTCGCTAAAAAAAAAAAAAAAAA |
| | AAAAAAAA |
| SEQ ID: 781 | ATGGACGACGACGACAAGtggtccgtcacgcaatAAAAAAAAAAAAAAAAAAAAAAA*A*A |
| SEQ ID: 782 | ATGGACGACGACGACAAGaggtgattgtgggataAAAAAAAAAAAAAAAAAAAAAAA*A*A |
| SEQ ID: 783 | ATGGACGACGACGACAAGagcggcgttgatacttAAAAAAAAAAAAAAAAAAAAAAA*A*A |
| SEQ ID: 784 | ATGGACGACGACGACAAGtaggtcgcgcttgcttAAAAAAAAAAAAAAAAAAAAAAA*A*A |
| SEQ ID: 785 | ATGGACGACGACGACAAGtgttgcaggttgctgtAAAAAAAAAAAAAAAAAAAAAAA*A*A |
| SEQ ID: 786 | ATGGACGACGACGACAAGgatgtgagttatgcagAAAAAAAAAAAAAAAAAAAAAAA*A*A |
| SEQ ID: 787 | ATGGACGACGACGACAAGaggtatcgcagtctggAAAAAAAAAAAAAAAAAAAAAAA*A*A |
| SEQ ID: 788 | ATGGACGACGACGACAAGtataatgggcgtctctAAAAAAAAAAAAAAAAAAAAAAA*A*A |
| SEQ ID: 789 | ATGGACGACGACGACAAGttcggcctggtgtaacAAAAAAAAAAAAAAAAAAAAAAA*A*A |
| SEQ ID: 790 | ATGGACGACGACGACAAGcctacgtatcgaagttAAAAAAAAAAAAAAAAAAAAAAA*A*A |
| SEQ ID: 791 | ATGGACGACGACGACAAGtctgccttgtatccgcAAAAAAAAAAAAAAAAAAAAAAA*A*A |
| SEQ ID: 792 | ATGGACGACGACGACAAGtgttgaccttcctcttAAAAAAAAAAAAAAAAAAAAAAA*A*A |
| SEQ ID: 793 | ATGGACGACGACGACAAGcctcatgcagtattgaAAAAAAAAAAAAAAAAAAAAAAA*A*A |
| SEQ ID: 794 | ATGGACGACGACGACAAGagtcatccacgcactcAAAAAAAAAAAAAAAAAAAAAAA*A*A |
| SEQ ID: 795 | ATGGACGACGACGACAAGaggttgtcgaattcccAAAAAAAAAAAAAAAAAAAAAAA*A*A |
| SEQ ID: 796 | ATGGACGACGACGACAAGtgcagaaaggtcatctAAAAAAAAAAAAAAAAAAAAAAA*A*A |
| SEQ ID: 797 | ATGGACGACGACGACAAGatttccggatcaatgcAAAAAAAAAAAAAAAAAAAAAAA*A*A |
| SEQ ID: 798 | ATGGACGACGACGACAAGgaatccgtactgattgAAAAAAAAAAAAAAAAAAAAAAA*A*A |
| SEQ ID: 799 | ATGGACGACGACGACAAGagagcgcagacattgcAAAAAAAAAAAAAAAAAAAAAAA*A*A |
| SEQ ID: 800 | ATGGACGACGACGACAAGtgtatgtctaccgagaAAAAAAAAAAAAAAAAAAAAAAA*A*A |
| SEQ ID: 801 | ATGGACGACGACGACAAGtgcttcctacgttcgtAAAAAAAAAAAAAAAAAAAAAAA*A*A |
| SEQ ID: 802 | ATGGACGACGACGACAAGtagtggggtaaaccatAAAAAAAAAAAAAAAAAAAAAAA*A*A |
| SEQ ID: 803 | ATGGACGACGACGACAAGcaaattttccatggcgAAAAAAAAAAAAAAAAAAAAAAA*A*A |
| SEQ ID: 804 | ATGGACGACGACGACAAGaaggccttcgtttcgaAAAAAAAAAAAAAAAAAAAAAAA*A*A |
| SEQ ID: 805 | ATGGACGACGACGACAAGgtcgagggagatatgcAAAAAAAAAAAAAAAAAAAAAAA*A*A |
| SEQ ID: 806 | ATGGACGACGACGACAAGctggacccagacatatAAAAAAAAAAAAAAAAAAAAAAA*A*A |
| SEQ ID: 807 | ATGGACGACGACGACAAGtagtcaagcactcggcAAAAAAAAAAAAAAAAAAAAAAA*A*A |
| SEQ ID: 808 | ATGGACGACGACGACAAGactaaggcggaaatctAAAAAAAAAAAAAAAAAAAAAAA*A*A |
| SEQ ID: 809 | ATGGACGACGACGACAAGtttagtgccggtgataAAAAAAAAAAAAAAAAAAAAAAA*A*A |
| SEQ ID: 810 | ATGGACGACGACGACAAGacttgcaacctaccggAAAAAAAAAAAAAAAAAAAAAAA*A*A |
| SEQ ID: 811 | ATGGACGACGACGACAAGtctacaacggacgtgaAAAAAAAAAAAAAAAAAAAAAAA*A*A |
| SEQ ID: 812 | ATGGACGACGACGACAAGagcaaaaccctacctaAAAAAAAAAAAAAAAAAAAAAAA*A*A |
| SEQ ID: 813 | ATGGACGACGACGACAAGttatcatcggtatgggAAAAAAAAAAAAAAAAAAAAAAA*A*A |
| SEQ ID: 814 | ATGGACGACGACGACAAGttctgcggatcgtcctAAAAAAAAAAAAAAAAAAAAAAA*A*A |
| SEQ ID: 815 | ATGGACGACGACGACAAGcctgcaaaggtatagcAAAAAAAAAAAAAAAAAAAAAAA*A*A |
| SEQ ID: 816 | ATGGACGACGACGACAAGagtactaagaagcgccAAAAAAAAAAAAAAAAAAAAAAA*A*A |
| SEQ ID: 817 | ATGGACGACGACGACAAGttggatacttgctgagAAAAAAAAAAAAAAAAAAAAAAA*A*A |
| SEQ ID: 818 | ATGGACGACGACGACAAGgtgtctccaaatcttcAAAAAAAAAAAAAAAAAAAAAAA*A*A |
| SEQ ID: 819 | ATGGACGACGACGACAAGgactctattacccaccAAAAAAAAAAAAAAAAAAAAAAA*A*A |
| SEQ ID: 820 | ATGGACGACGACGACAAGcagggattccaatatcAAAAAAAAAAAAAAAAAAAAAAA*A*A |
| SEQ ID: 821 | ATGGACGACGACGACAAGtatgcctagacaggttAAAAAAAAAAAAAAAAAAAAAAA*A*A |
| SEQ ID: 822 | ATGGACGACGACGACAAGagtagcattttcggtgAAAAAAAAAAAAAAAAAAAAAAA*A*A |
| SEQ ID: 823 | ATGGACGACGACGACAAGgacgtacgattgctacAAAAAAAAAAAAAAAAAAAAAAA*A*A |
| SEQ ID: 824 | ATGGACGACGACGACAAGgctcatgacatcgctaAAAAAAAAAAAAAAAAAAAAAAA*A*A |
| SEQ ID: 825 | ATGGACGACGACGACAAGgccttcaattctatggAAAAAAAAAAAAAAAAAAAAAAA*A*A |
| SEQ ID: 826 | ATGGACGACGACGACAAGctagtgttacaggtgcAAAAAAAAAAAAAAAAAAAAAAA*A*A |
| SEQ ID: 827 | ATGGACGACGACGACAAGccgagtgctctaaccaAAAAAAAAAAAAAAAAAAAAAAA*A*A |
| SEQ ID: 828 | ATGGACGACGACGACAAGatacgtcgtggcaacgAAAAAAAAAAAAAAAAAAAAAAA*A*A |
| SEQ ID: 829 | ATGGACGACGACGACAAGactgaggtccgatctaAAAAAAAAAAAAAAAAAAAAAAA*A*A |
| SEQ ID: 830 | ATGGACGACGACGACAAGttcgctcggaacatacAAAAAAAAAAAAAAAAAAAAAAA*A*A |
| SEQ ID: 831 | ATGGACGACGACGACAAGcaactcggtagttgagAAAAAAAAAAAAAAAAAAAAAAA*A*A |
| SEQ ID: 832 | ATGGACGACGACGACAAGtttgtttaggggttgcAAAAAAAAAAAAAAAAAAAAAAA*A*A |
| SEQ ID: 833 | ATGGACGACGACGACAAGaagcgcatttcgttctAAAAAAAAAAAAAAAAAAAAAAA*A*A |
| SEQ ID: 834 | ATGGACGACGACGACAAGcgagctccaactatcaAAAAAAAAAAAAAAAAAAAAAAA*A*A |
| SEQ ID: 835 | ATGGACGACGACGACAAGaatctggacggcttgtAAAAAAAAAAAAAAAAAAAAAAA*A*A |
| SEQ ID: 836 | ATGGACGACGACGACAAGcatttatgggtggtcaAAAAAAAAAAAAAAAAAAAAAAA*A*A |
| SEQ ID: 837 | ATGGACGACGACGACAAGattcctgataccagagAAAAAAAAAAAAAAAAAAAAAAA*A*A |
| SEQ ID: 838 | ATGGACGACGACGACAAGtgcaaatgcccaatacAAAAAAAAAAAAAAAAAAAAAAA*A*A |
| SEQ ID: 839 | ATGGACGACGACGACAAGtcattgttgggtaacgAAAAAAAAAAAAAAAAAAAAAAA*A*A |
| SEQ ID: 840 | ATGGACGACGACGACAAGcagtagccacgtgtgaAAAAAAAAAAAAAAAAAAAAAAA*A*A |
| SEQ ID: 841 | ATGGACGACGACGACAAGagaggatgggattactAAAAAAAAAAAAAAAAAAAAAAA*A*A |
| SEQ ID: 842 | ATGGACGACGACGACAAGctataagcgaaaccagAAAAAAAAAAAAAAAAAAAAAAA*A*A |
| SEQ ID: 843 | ATGGACGACGACGACAAGtgacgggctgtagtttAAAAAAAAAAAAAAAAAAAAAAA*A*A |
| SEQ ID: 844 | ATGGACGACGACGACAAGcctgtgtaagacgctgAAAAAAAAAAAAAAAAAAAAAAA*A*A |
| SEQ ID: 845 | ATGGACGACGACGACAAGtatggagacacaaacgAAAAAAAAAAAAAAAAAAAAAAA*A*A |
| SEQ ID: 846 | ATGGACGACGACGACAAGtacgaagggcagcataAAAAAAAAAAAAAAAAAAAAAAA*A*A |
| SEQ ID: 847 | ATGGACGACGACGACAAGggccgatatagcaagtAAAAAAAAAAAAAAAAAAAAAAA*A*A |
| SEQ ID: 848 | ATGGACGACGACGACAAGgagtggtcacacaggtAAAAAAAAAAAAAAAAAAAAAAA*A*A |
| SEQ ID: 849 | ATGGACGACGACGACAAGatatgattcacggtggAAAAAAAAAAAAAAAAAAAAAAA*A*A |
| SEQ ID: 850 | ATGGACGACGACGACAAGtgaccgagaccagagaAAAAAAAAAAAAAAAAAAAAAAA*A*A |
| SEQ ID: 851 | ATGGACGACGACGACAAGgctatcattgagcggaAAAAAAAAAAAAAAAAAAAAAAA*A*A |
| SEQ ID: 852 | ATGGACGACGACGACAAGtagtacgcaggttgatAAAAAAAAAAAAAAAAAAAAAAA*A*A |
| SEQ ID: 853 | ATGGACGACGACGACAAGtggatgtaacgcagcaAAAAAAAAAAAAAAAAAAAAAAA*A*A |
| SEQ ID: 854 | ATGGACGACGACGACAAGtcaactttgagggcacAAAAAAAAAAAAAAAAAAAAAAA*A*A |
| SEQ ID: 855 | ATGGACGACGACGACAAGctgaaaacctttgaggAAAAAAAAAAAAAAAAAAAAAAA*A*A |
| SEQ ID: 856 | ATGGACGACGACGACAAGaaggaaatagagctccAAAAAAAAAAAAAAAAAAAAAAA*A*A |
| SEQ ID: 857 | ATGGACGACGACGACAAGgtaaatcgccctggtaAAAAAAAAAAAAAAAAAAAAAAA*A*A |
| SEQ ID: 858 | ATGGACGACGACGACAAGgccttgtgaagcacgaAAAAAAAAAAAAAAAAAAAAAAA*A*A |
| SEQ ID: 859 | ATGGACGACGACGACAAGctattgaacaccgcagAAAAAAAAAAAAAAAAAAAAAAA*A*A |
| SEQ ID: 860 | ATGGACGACGACGACAAGtagtcccgagaccagaAAAAAAAAAAAAAAAAAAAAAAA*A*A |
| SEQ ID: 861 | ATGGACGACGACGACAAGtaccttcgaaagggccAAAAAAAAAAAAAAAAAAAAAAA*A*A |
| SEQ ID: 862 | ATGGACGACGACGACAAGaggggaaagatgtcagAAAAAAAAAAAAAAAAAAAAAAA*A*A |
| SEQ ID: 863 | ATGGACGACGACGACAAGcacacgagagaacaccAAAAAAAAAAAAAAAAAAAAAAA*A*A |
| SEQ ID: 864 | ATGGACGACGACGACAAGgagaacaaacgtggcgAAAAAAAAAAAAAAAAAAAAAAA*A*A |
| SEQ ID: 865 | ATGGACGACGACGACAAGgaaacaggaaccccacAAAAAAAAAAAAAAAAAAAAAAA*A*A |
| SEQ ID: 866 | ATGGACGACGACGACAAGgtatgggaccaacaacAAAAAAAAAAAAAAAAAAAAAAA*A*A |
| SEQ ID: 867 | ATGGACGACGACGACAAGagccgtgagttctccaAAAAAAAAAAAAAAAAAAAAAAA*A*A |
| SEQ ID: 868 | ATGGACGACGACGACAAGagcacggtagtgatgaAAAAAAAAAAAAAAAAAAAAAAA*A*A |
| SEQ ID: 869 | ATGGACGACGACGACAAGctcggcaatgaactgcAAAAAAAAAAAAAAAAAAAAAAA*A*A |
| SEQ ID: 870 | ATGGACGACGACGACAAGttcacggggagctacaAAAAAAAAAAAAAAAAAAAAAAA*A*A |
| SEQ ID: 871 | ATGGACGACGACGACAAGcccggaatattccctaAAAAAAAAAAAAAAAAAAAAAAA*A*A |
| SEQ ID: 872 | ATGGACGACGACGACAAGgcatcgtttccaacggAAAAAAAAAAAAAAAAAAAAAAA*A*A |
| SEQ ID: 873 | ATGGACGACGACGACAAGaaagtaagccaaccgcAAAAAAAAAAAAAAAAAAAAAAA*A*A |
| SEQ ID: 874 | ATGGACGACGACGACAAGagcctagcttaatgcgAAAAAAAAAAAAAAAAAAAAAAA*A*A |
| SEQ ID: 875 | ATGGACGACGACGACAAGgttaccctgcttcgagAAAAAAAAAAAAAAAAAAAAAAA*A*A |
| SEQ ID: 876 | ATGGACGACGACGACAAGgagtgaaagtcaccccAAAAAAAAAAAAAAAAAAAAAAA*A*A |
| SEQ ID: 877 | ATGGACGACGACGACAAGctagtctatttgcgacAAAAAAAAAAAAAAAAAAAAAAA*A*A |
| SEQ ID: 878 | ATGGACGACGACGACAAGgttgggtaaacgcagcAAAAAAAAAAAAAAAAAAAAAAA*A*A |
| SEQ ID: 879 | ATGGACGACGACGACAAGtggaactgtatagctgAAAAAAAAAAAAAAAAAAAAAAA*A*A |
| SEQ ID: 880 | ATGGACGACGACGACAAGctgacagttcacccgtAAAAAAAAAAAAAAAAAAAAAAA*A*A |
| SEQ ID: 881 | ATGGACGACGACGACAAGtcaactggcatgtgtaAAAAAAAAAAAAAAAAAAAAAAA*A*A |
| SEQ ID: 882 | ATGGACGACGACGACAAGcctactggtactacgcAAAAAAAAAAAAAAAAAAAAAAA*A*A |
| SEQ ID: 883 | ATGGACGACGACGACAAGactaggtgctcagttcAAAAAAAAAAAAAAAAAAAAAAA*A*A |
| SEQ ID: 884 | ATGGACGACGACGACAAGaagcgtgttgctgcagAAAAAAAAAAAAAAAAAAAAAAA*A*A |
| SEQ ID: 885 | ATGGACGACGACGACAAGcagctgagatcaggtcAAAAAAAAAAAAAAAAAAAAAAA*A*A |
| SEQ ID: 886 | ATGGACGACGACGACAAGgcactgcttatagaagAAAAAAAAAAAAAAAAAAAAAAA*A*A |
| SEQ ID: 887 | ATGGACGACGACGACAAGtgatgtacgattggagAAAAAAAAAAAAAAAAAAAAAAA*A*A |
| SEQ ID: 888 | ATGGACGACGACGACAAGttcagtggacatcctcAAAAAAAAAAAAAAAAAAAAAAA*A*A |
| SEQ ID: 889 | ATGGACGACGACGACAAGgttttaggtagggaagAAAAAAAAAAAAAAAAAAAAAAA*A*A |
| SEQ ID: 890 | ATGGACGACGACGACAAGtgtgacaagcatgagtAAAAAAAAAAAAAAAAAAAAAAA*A*A |
| SEQ ID: 891 | ATGGACGACGACGACAAGggattcccctaagcagAAAAAAAAAAAAAAAAAAAAAAA*A*A |
| SEQ ID: 892 | ATGGACGACGACGACAAGcagcctatcgaccaagAAAAAAAAAAAAAAAAAAAAAAA*A*A |
| SEQ ID: 893 | ATGGACGACGACGACAAGtatcggtagtccctctAAAAAAAAAAAAAAAAAAAAAAA*A*A |
| SEQ ID: 894 | ATGGACGACGACGACAAGttacgcgttcagacggAAAAAAAAAAAAAAAAAAAAAAA*A*A |
| SEQ ID: 895 | ATGGACGACGACGACAAGatgaggtagctccaccAAAAAAAAAAAAAAAAAAAAAAA*A*A |
| SEQ ID: 896 | ATGGACGACGACGACAAGggggagtgtgtgtataAAAAAAAAAAAAAAAAAAAAAAA*A*A |
| SEQ ID: 897 | ATGGACGACGACGACAAGgttcgggcttttcgacAAAAAAAAAAAAAAAAAAAAAAA*A*A |
| SEQ ID: 898 | ATGGACGACGACGACAAGtgcgcagaaacctcgaAAAAAAAAAAAAAAAAAAAAAAA*A*A |
| SEQ ID: 899 | ATGGACGACGACGACAAGcggtaccgtttcacgaAAAAAAAAAAAAAAAAAAAAAAA*A*A |
| SEQ ID: 900 | ATGGACGACGACGACAAGccgattgatgaacgtcAAAAAAAAAAAAAAAAAAAAAAA*A*A |
| SEQ ID: 901 | ATGGACGACGACGACAAGatcacctgaggaactaAAAAAAAAAAAAAAAAAAAAAAA*A*A |
| SEQ ID: 902 | ATGGACGACGACGACAAGctcgaattagcgcggaAAAAAAAAAAAAAAAAAAAAAAA*A*A |
| SEQ ID: 903 | ATGGACGACGACGACAAGatacagagacgaccatAAAAAAAAAAAAAAAAAAAAAAA*A*A |
| SEQ ID: 904 | ATGGACGACGACGACAAGggtacactgaaatggtAAAAAAAAAAAAAAAAAAAAAAA*A*A |
| SEQ ID: 905 | ATGGACGACGACGACAAGcaggatgaacctatacAAAAAAAAAAAAAAAAAAAAAAA*A*A |
| SEQ ID: 906 | ATGGACGACGACGACAAGcagatggccgataagaAAAAAAAAAAAAAAAAAAAAAAA*A*A |
| SEQ ID: 907 | ATGGACGACGACGACAAGctagtgagggcgcattAAAAAAAAAAAAAAAAAAAAAAA*A*A |
| SEQ ID: 908 | ATGGACGACGACGACAAGtgatacgactagcgccAAAAAAAAAAAAAAAAAAAAAAA*A*A |
| SEQ ID: 909 | ATGGACGACGACGACAAGgatcacctgcaggctaAAAAAAAAAAAAAAAAAAAAAAA*A*A |
| SEQ ID: 910 | ATGGACGACGACGACAAGgcatgttgccagaagaAAAAAAAAAAAAAAAAAAAAAAA*A*A |
| SEQ ID: 911 | ATGGACGACGACGACAAGgagacgtagtactatgAAAAAAAAAAAAAAAAAAAAAAA*A*A |
| SEQ ID: 912 | ATGGACGACGACGACAAGtccagctcaacaacgtAAAAAAAAAAAAAAAAAAAAAAA*A*A |
| SEQ ID: 913 | ATGGACGACGACGACAAGcagtgcctgagatgacAAAAAAAAAAAAAAAAAAAAAAA*A*A |
| SEQ ID: 914 | ATGGACGACGACGACAAGagcacctctaagtcggAAAAAAAAAAAAAAAAAAAAAAA*A*A |
| SEQ ID: 915 | ATGGACGACGACGACAAGttgcgttagagtgtcgAAAAAAAAAAAAAAAAAAAAAAA*A*A |
| SEQ ID: 916 | ATGGACGACGACGACAAGgtcaaatcgtctgcacAAAAAAAAAAAAAAAAAAAAAAA*A*A |
| SEQ ID: 917 | ATGGACGACGACGACAAGgcaacttgtgcctacaAAAAAAAAAAAAAAAAAAAAAAA*A*A |
| SEQ ID: 918 | ATGGACGACGACGACAAGcgagcaaagtgtccttAAAAAAAAAAAAAAAAAAAAAAA*A*A |
| SEQ ID: 919 | ATGGACGACGACGACAAGcatgaaagacacgacgAAAAAAAAAAAAAAAAAAAAAAA*A*A |
| SEQ ID: 920 | ATGGACGACGACGACAAGaggagtatctcacacaAAAAAAAAAAAAAAAAAAAAAAA*A*A |
| SEQ ID: 921 | ATGGACGACGACGACAAGtcgtgcatacctagagAAAAAAAAAAAAAAAAAAAAAAA*A*A |
| SEQ ID: 922 | ATGGACGACGACGACAAGctcattcccagatcggAAAAAAAAAAAAAAAAAAAAAAA*A*A |
| SEQ ID: 923 | ATGGACGACGACGACAAGtacctagcaaggacggAAAAAAAAAAAAAAAAAAAAAAA*A*A |
| SEQ ID: 924 | ATGGACGACGACGACAAGtacagagtccgctgttAAAAAAAAAAAAAAAAAAAAAAA*A*A |
| SEQ ID: 925 | ATGGACGACGACGACAAGctgttggaatttctggAAAAAAAAAAAAAAAAAAAAAAA*A*A |
| SEQ ID: 926 | ATGGACGACGACGACAAGtaggccgaagtaccacAAAAAAAAAAAAAAAAAAAAAAA*A*A |
| SEQ ID: 927 | ATGGACGACGACGACAAGcacgtaacgagtttgcAAAAAAAAAAAAAAAAAAAAAAA*A*A |
| SEQ ID: 928 | ATGGACGACGACGACAAGggtcctaatctatgtgAAAAAAAAAAAAAAAAAAAAAAA*A*A |
| SEQ ID: 929 | ATGGACGACGACGACAAGgagcgtgcagattaccAAAAAAAAAAAAAAAAAAAAAAA*A*A |
| SEQ ID: 930 | ATGGACGACGACGACAAGtcactcgaacggagacAAAAAAAAAAAAAAAAAAAAAAA*A*A |
| SEQ ID: 931 | ATGGACGACGACGACAAGtgggcaacagagtaggAAAAAAAAAAAAAAAAAAAAAAA*A*A |
| SEQ ID: 932 | ATGGACGACGACGACAAGtgatatggagacaccaAAAAAAAAAAAAAAAAAAAAAAA*A*A |
| SEQ ID: 933 | ATGGACGACGACGACAAGcattgtggcaagactgAAAAAAAAAAAAAAAAAAAAAAA*A*A |
| SEQ ID: 934 | ATGGACGACGACGACAAGttatgactaccgcacaAAAAAAAAAAAAAAAAAAAAAAA*A*A |
| SEQ ID: 935 | ATGGACGACGACGACAAGtatgcggaacgttgtgAAAAAAAAAAAAAAAAAAAAAAA*A*A |
| SEQ ID: 936 | ATGGACGACGACGACAAGccattgcgtcttgtccAAAAAAAAAAAAAAAAAAAAAAA*A*A |
| SEQ ID: 937 | ATGGACGACGACGACAAGtggcgctgcgtataatAAAAAAAAAAAAAAAAAAAAAAA*A*A |
| SEQ ID: 938 | ATGGACGACGACGACAAGtgccttacgacacgtaAAAAAAAAAAAAAAAAAAAAAAA*A*A |
| SEQ ID: 939 | ATGGACGACGACGACAAGgtttgggtaggagggaAAAAAAAAAAAAAAAAAAAAAAA*A*A |
| SEQ ID: 940 | ATGGACGACGACGACAAGgttcgttttcggtgccAAAAAAAAAAAAAAAAAAAAAAA*A*A |
| SEQ ID: 941 | ATGGACGACGACGACAAGatattcgccggcaaatAAAAAAAAAAAAAAAAAAAAAAA*A*A |
| SEQ ID: 942 | ATGGACGACGACGACAAGgggaatcatttgctccAAAAAAAAAAAAAAAAAAAAAAA*A*A |
| SEQ ID: 943 | ATGGACGACGACGACAAGccacggaactcgatgtAAAAAAAAAAAAAAAAAAAAAAA*A*A |
| SEQ ID: 944 | ATGGACGACGACGACAAGgtaatctttgctctcgAAAAAAAAAAAAAAAAAAAAAAA*A*A |
| SEQ ID: 945 | ATGGACGACGACGACAAGaagtgcggtatcgaggAAAAAAAAAAAAAAAAAAAAAAA*A*A |
| SEQ ID: 946 | ATGGACGACGACGACAAGgggctgcaagttcacaAAAAAAAAAAAAAAAAAAAAAAA*A*A |
| SEQ ID: 947 | ATGGACGACGACGACAAGaacccaagcagctatcAAAAAAAAAAAAAAAAAAAAAAA*A*A |
| SEQ ID: 948 | ATGGACGACGACGACAAGgatggagaggttgaatAAAAAAAAAAAAAAAAAAAAAAA*A*A |
| SEQ ID: 949 | ATGGACGACGACGACAAGttagaggttgacggtaAAAAAAAAAAAAAAAAAAAAAAA*A*A |
| SEQ ID: 950 | ATGGACGACGACGACAAGgataatctccgacggcAAAAAAAAAAAAAAAAAAAAAAA*A*A |
| SEQ ID: 951 | ATGGACGACGACGACAAGagattagtgctcccgaAAAAAAAAAAAAAAAAAAAAAAA*A*A |
| SEQ ID: 952 | ATGGACGACGACGACAAGactccagttcttgtacAAAAAAAAAAAAAAAAAAAAAAA*A*A |
| SEQ ID: 953 | ATGGACGACGACGACAAGcaccctactcaaagacAAAAAAAAAAAAAAAAAAAAAAA*A*A |
| SEQ ID: 954 | ATGGACGACGACGACAAGtacctcatacgcgttgAAAAAAAAAAAAAAAAAAAAAAA*A*A |
| SEQ ID: 955 | ATGGACGACGACGACAAGcgaaaatcgggtagatAAAAAAAAAAAAAAAAAAAAAAA*A*A |
| SEQ ID: 956 | ATGGACGACGACGACAAGcgatcgctcctaccatAAAAAAAAAAAAAAAAAAAAAAA*A*A |
| SEQ ID: 957 | ATGGACGACGACGACAAGcccactccatactagaAAAAAAAAAAAAAAAAAAAAAAA*A*A |
| SEQ ID: 958 | ATGGACGACGACGACAAGacggctttacgcaagaAAAAAAAAAAAAAAAAAAAAAAA*A*A |
| SEQ ID: 959 | ATGGACGACGACGACAAGtcgcagaaccatctgcAAAAAAAAAAAAAAAAAAAAAAA*A*A |
| SEQ ID: 960 | ATGGACGACGACGACAAGgagttgctagcctgtaAAAAAAAAAAAAAAAAAAAAAAA*A*A |
| SEQ ID: 961 | ATGGACGACGACGACAAGttaactgcttcagccgAAAAAAAAAAAAAAAAAAAAAAA*A*A |
| SEQ ID: 962 | ATGGACGACGACGACAAGtcgcgatgaccgctatAAAAAAAAAAAAAAAAAAAAAAA*A*A |
| SEQ ID: 963 | ATGGACGACGACGACAAGgacgaacgcgttaccaAAAAAAAAAAAAAAAAAAAAAAA*A*A |
| SEQ ID: 964 | ATGGACGACGACGACAAGcggcaaaactactgtcAAAAAAAAAAAAAAAAAAAAAAA*A*A |
| SEQ ID: 965 | ATGGACGACGACGACAAGcccgactctgatgaagAAAAAAAAAAAAAAAAAAAAAAA*A*A |
| SEQ ID: 966 | ATGGACGACGACGACAAGactgcgctacagagtcAAAAAAAAAAAAAAAAAAAAAAA*A*A |
| SEQ ID: 967 | ATGGACGACGACGACAAGacggtgtaccttagggAAAAAAAAAAAAAAAAAAAAAAA*A*A |
| SEQ ID: 968 | ATGGACGACGACGACAAGtcgagtccgcagtatcAAAAAAAAAAAAAAAAAAAAAAA*A*A |
| SEQ ID: 969 | ATGGACGACGACGACAAGgacgctgcctaattggAAAAAAAAAAAAAAAAAAAAAAA*A*A |
| SEQ ID: 970 | ATGGACGACGACGACAAGtggggatggactagtaAAAAAAAAAAAAAAAAAAAAAAA*A*A |
| SEQ ID: 971 | ATGGACGACGACGACAAGgctctaaaggccacagAAAAAAAAAAAAAAAAAAAAAAA*A*A |
| SEQ ID: 972 | ATGGACGACGACGACAAGcaggagtggtgccttaAAAAAAAAAAAAAAAAAAAAAAA*A*A |
| SEQ ID: 973 | ATGGACGACGACGACAAGccgagaagtgttttgaAAAAAAAAAAAAAAAAAAAAAAA*A*A |
| SEQ ID: 974 | ATGGACGACGACGACAAGtgttcaagccacctagAAAAAAAAAAAAAAAAAAAAAAA*A*A |
| SEQ ID: 975 | ATGGACGACGACGACAAGctcccttgagtgtagcAAAAAAAAAAAAAAAAAAAAAAA*A*A |
| SEQ ID: 976 | ATGGACGACGACGACAAGaatgagcactaccgacAAAAAAAAAAAAAAAAAAAAAAA*A*A |
| SEQ ID: 977 | ATGGACGACGACGACAAGacgcaagtcgcaaagcAAAAAAAAAAAAAAAAAAAAAAA*A*A |
| SEQ ID: 978 | ATGGACGACGACGACAAGattgggagagtcagttAAAAAAAAAAAAAAAAAAAAAAA*A*A |
| SEQ ID: 979 | ATGGACGACGACGACAAGgcgacctatataaagcAAAAAAAAAAAAAAAAAAAAAAA*A*A |
| SEQ ID: 980 | ATGGACGACGACGACAAGatccgccacttcagatAAAAAAAAAAAAAAAAAAAAAAA*A*A |
| SEQ ID: 981 | ATGGACGACGACGACAAGtaagcgggttcctattAAAAAAAAAAAAAAAAAAAAAAA*A*A |
| SEQ ID: 982 | ATGGACGACGACGACAAGaccctacgtaccgtcaAAAAAAAAAAAAAAAAAAAAAAA*A*A |
| SEQ ID: 983 | ATGGACGACGACGACAAGtgcgccatcggttttcAAAAAAAAAAAAAAAAAAAAAAA*A*A |
| SEQ ID: 984 | ATGGACGACGACGACAAGgcctaacttctgcctcAAAAAAAAAAAAAAAAAAAAAAA*A*A |
| SEQ ID: 985 | ATGGACGACGACGACAAGgtcctttaatcccctaAAAAAAAAAAAAAAAAAAAAAAA*A*A |
| SEQ ID: 986 | ATGGACGACGACGACAAGgattgtctagacgtagAAAAAAAAAAAAAAAAAAAAAAA*A*A |
| SEQ ID: 987 | ATGGACGACGACGACAAGaacccgcaaaatcctaAAAAAAAAAAAAAAAAAAAAAAA*A*A |
| SEQ ID: 988 | ATGGACGACGACGACAAGtacaacaccaacgctcAAAAAAAAAAAAAAAAAAAAAAA*A*A |
| SEQ ID: 989 | ATGGACGACGACGACAAGtgtgctattgtctccaAAAAAAAAAAAAAAAAAAAAAAA*A*A |
| SEQ ID: 990 | ATGGACGACGACGACAAGagatccacacccggttAAAAAAAAAAAAAAAAAAAAAAA*A*A |
| SEQ ID: 991 | ATGGACGACGACGACAAGgtggtctccaccatcaAAAAAAAAAAAAAAAAAAAAAAA*A*A |
| SEQ ID: 992 | ATGGACGACGACGACAAGgatattccgtcaaaccAAAAAAAAAAAAAAAAAAAAAAA*A*A |
| SEQ ID: 993 | ATGGACGACGACGACAAGacatcgtcgcggattaAAAAAAAAAAAAAAAAAAAAAAA*A*A |
| SEQ ID: 994 | ATGGACGACGACGACAAGaacggtatttggcggcAAAAAAAAAAAAAAAAAAAAAAA*A*A |
| SEQ ID: 995 | ATGGACGACGACGACAAGcgctggattgcaaatgAAAAAAAAAAAAAAAAAAAAAAA*A*A |
| SEQ ID: 996 | ATGGACGACGACGACAAGcaaaggggttacatcgAAAAAAAAAAAAAAAAAAAAAAA*A*A |
| SEQ ID: 997 | ATGGACGACGACGACAAGcgagcagttcaaggagAAAAAAAAAAAAAAAAAAAAAAA*A*A |
| SEQ ID: 998 | ATGGACGACGACGACAAGagtagggtccagcatgAAAAAAAAAAAAAAAAAAAAAAA*A*A |
| SEQ ID: 999 | ATGGACGACGACGACAAGatgcttgcccagtctaAAAAAAAAAAAAAAAAAAAAAAA*A*A |
| SEQ ID: | ATGGACGACGACGACAAGtcgtaaatctaggcgaAAAAAAAAAAAAAAAAAAAAAAA*A*A |
| 1000 | |
| SEQ ID: | ATGGACGACGACGACAAGtggtgacatagagcgcAAAAAAAAAAAAAAAAAAAAAAA*A*A |
| 1001 | |
| SEQ ID: | ATGGACGACGACGACAAGttggtcgacttcgaagAAAAAAAAAAAAAAAAAAAAAAA*A*A |
| 1002 | |
| SEQ ID: | ATGGACGACGACGACAAGccacttaccgtctctcAAAAAAAAAAAAAAAAAAAAAAA*A*A |
| 1003 | |
| SEQ ID: | ATGGACGACGACGACAAGtgtcctaagtcgacgaAAAAAAAAAAAAAAAAAAAAAAA*A*A |
| 1004 | |
| SEQ ID: | ATGGACGACGACGACAAGgcgaacggacgataacAAAAAAAAAAAAAAAAAAAAAAA*A*A |
| 1005 | |
| SEQ ID: | ATGGACGACGACGACAAGacggtgagtaaccatgAAAAAAAAAAAAAAAAAAAAAAA*A*A |
| 1006 | |
| SEQ ID: | ATGGACGACGACGACAAGgaatgtgagacgggctAAAAAAAAAAAAAAAAAAAAAAA*A*A |
| 1007 | |
| SEQ ID: | ATGGACGACGACGACAAGgattggtgtgctcgcaAAAAAAAAAAAAAAAAAAAAAAA*A*A |
| 1008 | |
| SEQ ID: | ATGGACGACGACGACAAGcggacttcttacgttcAAAAAAAAAAAAAAAAAAAAAAA*A*A |
| 1009 | |
| SEQ ID: | ATGGACGACGACGACAAGacatccaaaggctccaAAAAAAAAAAAAAAAAAAAAAAA*A*A |
| 1010 | |
| SEQ ID: | ATGGACGACGACGACAAGttagagtccttacacgAAAAAAAAAAAAAAAAAAAAAAA*A*A |
| 1011 | |
| SEQ ID: | ATGGACGACGACGACAAGacgctcaaggttgtgtAAAAAAAAAAAAAAAAAAAAAAA*A*A |
| 1012 | |
| SEQ ID: | ATGGACGACGACGACAAGcggggcctaataatggAAAAAAAAAAAAAAAAAAAAAAA*A*A |
| 1013 | |
| SEQ ID: | ATGGACGACGACGACAAGccgtaagcctggattgAAAAAAAAAAAAAAAAAAAAAAA*A*A |
| 1014 | |
| SEQ ID: | ATGGACGACGACGACAAGgctacgctatgtgttaAAAAAAAAAAAAAAAAAAAAAAA*A*A |
| 1015 | |
| SEQ ID: | ATGGACGACGACGACAAGaaacaccagtgggtagAAAAAAAAAAAAAAAAAAAAAAA*A*A |
| 1016 | |
| SEQ ID: | ATGGACGACGACGACAAGttgactctaaggcaggAAAAAAAAAAAAAAAAAAAAAAA*A*A |
| 1017 | |
| SEQ ID: | ATGGACGACGACGACAAGcactatttgtcttgggAAAAAAAAAAAAAAAAAAAAAAA*A*A |
| 1018 | |
| SEQ ID: | ATGGACGACGACGACAAGgctacaagttgaccatAAAAAAAAAAAAAAAAAAAAAAA*A*A |
| 1019 | |
| SEQ ID: | ATGGACGACGACGACAAGgcagtagcggatactcAAAAAAAAAAAAAAAAAAAAAAA*A*A |
| 1020 | |
| SEQ ID: | ATGGACGACGACGACAAGaactggtatcgctcacAAAAAAAAAAAAAAAAAAAAAAA*A*A |
| 1021 | |
| SEQ ID: | ATGGACGACGACGACAAGagcttgacgagcctatAAAAAAAAAAAAAAAAAAAAAAA*A*A |
| 1022 | |
| SEQ ID: | ATGGACGACGACGACAAGattgccgatgagtagaAAAAAAAAAAAAAAAAAAAAAAA*A*A |
| 1023 | |
| SEQ ID: | ATGGACGACGACGACAAGaacaggtggttacggtAAAAAAAAAAAAAAAAAAAAAAA*A*A |
| 1024 | |
| SEQ ID: | ATGGACGACGACGACAAGaaactgacgctcgaggAAAAAAAAAAAAAAAAAAAAAAA*A*A |
| 1025 | |
| SEQ ID: | ATGGACGACGACGACAAGcgaaatgtcggctcagAAAAAAAAAAAAAAAAAAAAAAA*A*A |
| 1026 | |
| SEQ ID: | ATGGACGACGACGACAAGtccgatctcagagtttAAAAAAAAAAAAAAAAAAAAAAA*A*A |
| 1027 | |
| SEQ ID: | ATGGACGACGACGACAAGactgcttcgagaagcgAAAAAAAAAAAAAAAAAAAAAAA*A*A |
| 1028 | |
| SEQ ID: | ATGGACGACGACGACAAGgtgatgctgtagggcaAAAAAAAAAAAAAAAAAAAAAAA*A*A |
| 1029 | |
| SEQ ID: | ATGGACGACGACGACAAGagtgggtatgtggtacAAAAAAAAAAAAAAAAAAAAAAA*A*A |
| 1030 | |
| SEQ ID: | ATGGACGACGACGACAAGggagtaagttcaagcaAAAAAAAAAAAAAAAAAAAAAAA*A*A |
| 1031 | |
| SEQ ID: | ATGGACGACGACGACAAGgagcagttttcgccgaAAAAAAAAAAAAAAAAAAAAAAA*A*A |
| 1032 | |
| SEQ ID: | ATGGACGACGACGACAAGcgattacgagtctaggAAAAAAAAAAAAAAAAAAAAAAA*A*A |
| 1033 | |
| SEQ ID: | ATGGACGACGACGACAAGcgcggcacttcttagaAAAAAAAAAAAAAAAAAAAAAAA*A*A |
| 1034 | |
| SEQ ID: | ATGGACGACGACGACAAGggtgcagttcctaagaAAAAAAAAAAAAAAAAAAAAAAA*A*A |
| 1035 | |
| SEQ ID: | ATGGACGACGACGACAAGcgtaggcattagaagaAAAAAAAAAAAAAAAAAAAAAAA*A*A |
| 1036 | |
| SEQ ID: | ATGGACGACGACGACAAGgctatcatcagcgcctAAAAAAAAAAAAAAAAAAAAAAA*A*A |
| 1037 | |
| SEQ ID: | ATGGACGACGACGACAAGgcgggtaggtctaaatAAAAAAAAAAAAAAAAAAAAAAA*A*A |
| 1038 | |
| SEQ ID: | ATGGACGACGACGACAAGcgtccctttgaacattAAAAAAAAAAAAAAAAAAAAAAA*A*A |
| 1039 | |
| SEQ ID: | ATGGACGACGACGACAAGtcagactgcgagacttAAAAAAAAAAAAAAAAAAAAAAA*A*A |
| 1040 | |
| SEQ ID: | ATGGACGACGACGACAAGtgtgttcgttatcggtAAAAAAAAAAAAAAAAAAAAAAA*A*A |
| 1041 | |
| SEQ ID: | ATGGACGACGACGACAAGcctaacagcgtaagcaAAAAAAAAAAAAAAAAAAAAAAA*A*A |
| 1042 | |
| SEQ ID: | ATGGACGACGACGACAAGcctgacatttccgtcaAAAAAAAAAAAAAAAAAAAAAAA*A*A |
| 1043 | |
| SEQ ID: | ATGGACGACGACGACAAGcgaaaccatcgccaatAAAAAAAAAAAAAAAAAAAAAAA*A*A |
| 1044 | |
| SEQ ID: | ATGGACGACGACGACAAGgatcacagaagagtgcAAAAAAAAAAAAAAAAAAAAAAA*A*A |
| 1045 | |
| SEQ ID: | ATGGACGACGACGACAAGacgatacagagcaggtAAAAAAAAAAAAAAAAAAAAAAA*A*A |
| 1046 | |
| SEQ ID: | ATGGACGACGACGACAAGgtcaggaacgagtcttAAAAAAAAAAAAAAAAAAAAAAA*A*A |
| 1047 | |
| SEQ ID: | ATGGACGACGACGACAAGatactgattccctgtcAAAAAAAAAAAAAAAAAAAAAAA*A*A |
| 1048 | |
| SEQ ID: | ATGGACGACGACGACAAGttttcgccatggttgtAAAAAAAAAAAAAAAAAAAAAAA*A*A |
| 1049 | |
| SEQ ID: | ATGGACGACGACGACAAGgttcctacgaacaactAAAAAAAAAAAAAAAAAAAAAAA*A*A |
| 1050 | |
| SEQ ID: | ATGGACGACGACGACAAGtcgataacgctactacAAAAAAAAAAAAAAAAAAAAAAA*A*A |
| 1051 | |
| SEQ ID: | ATGGACGACGACGACAAGtggaacacctgaagttAAAAAAAAAAAAAAAAAAAAAAA*A*A |
| 1052 | |
| SEQ ID: | ATGGACGACGACGACAAGcacgacgtgaaactctAAAAAAAAAAAAAAAAAAAAAAA*A*A |
| 1053 | |
| SEQ ID: | ATGGACGACGACGACAAGatccagtttcaagaggAAAAAAAAAAAAAAAAAAAAAAA*A*A |
| 1054 | |
| SEQ ID: | ATGGACGACGACGACAAGctgcggcgatctttcaAAAAAAAAAAAAAAAAAAAAAAA*A*A |
| 1055 | |
| SEQ ID: | ATGGACGACGACGACAAGcggacttgacttccagAAAAAAAAAAAAAAAAAAAAAAA*A*A |
| 1056 | |
| SEQ ID: | ATGGACGACGACGACAAGgtgtgaatgcataagcAAAAAAAAAAAAAAAAAAAAAAA*A*A |
| 1057 | |
| SEQ ID: | ATGGACGACGACGACAAGtcaccgtgttaggtcaAAAAAAAAAAAAAAAAAAAAAAA*A*A |
| 1058 | |
| SEQ ID: | ATGGACGACGACGACAAGggcatgattgtcgcacAAAAAAAAAAAAAAAAAAAAAAA*A*A |
| 1059 | |
| SEQ ID: | ATGGACGACGACGACAAGgcctagggacacgattAAAAAAAAAAAAAAAAAAAAAAA*A*A |
| 1060 | |
| SEQ ID: | ATGGACGACGACGACAAGacagtccaccatgatcAAAAAAAAAAAAAAAAAAAAAAA*A*A |
| 1061 | |
| SEQ ID: | ATGGACGACGACGACAAGcaaccagtatagaagcAAAAAAAAAAAAAAAAAAAAAAA*A*A |
| 1062 | |
| SEQ ID: | ATGGACGACGACGACAAGtgtaactcacgggttaAAAAAAAAAAAAAAAAAAAAAAA*A*A |
| 1063 | |
| SEQ ID: | ATGGACGACGACGACAAGatagacccttggccctAAAAAAAAAAAAAAAAAAAAAAA*A*A |
| 1064 | |
| SEQ ID: | ATGGACGACGACGACAAGctgtgtatgccctttgAAAAAAAAAAAAAAAAAAAAAAA*A*A |
| 1065 | |
| SEQ ID: | ATGGACGACGACGACAAGatcccaaacttagtgcAAAAAAAAAAAAAAAAAAAAAAA*A*A |
| 1066 | |
| SEQ ID: | ATGGACGACGACGACAAGtcttattacgcccggaAAAAAAAAAAAAAAAAAAAAAAA*A*A |
| 1067 | |
| SEQ ID: | ATGGACGACGACGACAAGacgaatagtgcgccacAAAAAAAAAAAAAAAAAAAAAAA*A*A |
| 1068 | |
| SEQ ID: | ATGGACGACGACGACAAGatgcactgatgatgcgAAAAAAAAAAAAAAAAAAAAAAA*A*A |
| 1069 | |
| SEQ ID: | ATGGACGACGACGACAAGggtaaagtgtcccaagAAAAAAAAAAAAAAAAAAAAAAA*A*A |
| 1070 | |
| SEQ ID: | ATGGACGACGACGACAAGggaagaactagtcccgAAAAAAAAAAAAAAAAAAAAAAA*A*A |
| 1071 | |
| SEQ ID: | ATGGACGACGACGACAAGtagccagatgaaatggAAAAAAAAAAAAAAAAAAAAAAA*A*A |
| 1072 | |
| SEQ ID: | ATGGACGACGACGACAAGacgacacaatgattccAAAAAAAAAAAAAAAAAAAAAAA*A*A |
| 1073 | |
| SEQ ID: | ATGGACGACGACGACAAGccatgtgaaagccaggAAAAAAAAAAAAAAAAAAAAAAA*A*A |
| 1074 | |
| SEQ ID: | ATGGACGACGACGACAAGagggtagaacctcattAAAAAAAAAAAAAAAAAAAAAAA*A*A |
| 1075 | |
| SEQ ID: | ATGGACGACGACGACAAGaacagaaacccgaagaAAAAAAAAAAAAAAAAAAAAAAA*A*A |
| 1076 | |
| SEQ ID: | ATGGACGACGACGACAAGtgggtcggaaatttacAAAAAAAAAAAAAAAAAAAAAAA*A*A |
| 1077 | |
| SEQ ID: | ATGGACGACGACGACAAGccgcagcatacaatccAAAAAAAAAAAAAAAAAAAAAAA*A*A |
| 1078 | |
| SEQ ID: | ATGGACGACGACGACAAGatccagacaacgttgaAAAAAAAAAAAAAAAAAAAAAAA*A*A |
| 1079 | |
| SEQ ID: | ATGGACGACGACGACAAGcaaatggcacgcccttAAAAAAAAAAAAAAAAAAAAAAA*A*A |
| 1080 | |
| SEQ ID: | ATGGACGACGACGACAAGccactcatatacgggtAAAAAAAAAAAAAAAAAAAAAAA*A*A |
| 1081 | |
| SEQ ID: | ATGGACGACGACGACAAGttgaccgtagaatgtgAAAAAAAAAAAAAAAAAAAAAAA*A*A |
| 1082 | |
| SEQ ID: | ATGGACGACGACGACAAGtttcatcggccagtggAAAAAAAAAAAAAAAAAAAAAAA*A*A |
| 1083 | |
| SEQ ID: | ATGGACGACGACGACAAGacgtacccggtagacaAAAAAAAAAAAAAAAAAAAAAAA*A*A |
| 1084 | |
| SEQ ID: | ATGGACGACGACGACAAGgcagggtggaacctatAAAAAAAAAAAAAAAAAAAAAAA*A*A |
| 1085 | |
| SEQ ID: | ATGGACGACGACGACAAGacgtatttattccgccAAAAAAAAAAAAAAAAAAAAAAA*A*A |
| 1086 | |
| SEQ ID: | ATGGACGACGACGACAAGtgtggtcactcggaatAAAAAAAAAAAAAAAAAAAAAAA*A*A |
| 1087 | |
| SEQ ID: | ATGGACGACGACGACAAGctggcatgttgtaggtAAAAAAAAAAAAAAAAAAAAAAA*A*A |
| 1088 | |
| SEQ ID: | ATGGACGACGACGACAAGttaggcaggtgcattgAAAAAAAAAAAAAAAAAAAAAAA*A*A |
| 1089 | |
| SEQ ID: | ATGGACGACGACGACAAGccagaggaaatggggaAAAAAAAAAAAAAAAAAAAAAAA*A*A |
| 1090 | |
| SEQ ID: | ATGGACGACGACGACAAGtgtcaacgcatgaaagAAAAAAAAAAAAAAAAAAAAAAA*A*A |
| 1091 | |
| SEQ ID: | ATGGACGACGACGACAAGcgtttcaatgcagggtAAAAAAAAAAAAAAAAAAAAAAA*A*A |
| 1092 | |
| SEQ ID: | ATGGACGACGACGACAAGgaccccggtaagtttaAAAAAAAAAAAAAAAAAAAAAAA*A*A |
| 1093 | |
| SEQ ID: | ATGGACGACGACGACAAGctcattacggacagtgAAAAAAAAAAAAAAAAAAAAAAA*A*A |
| 1094 | |
| SEQ ID: | ATGGACGACGACGACAAGgggccattagtagtgtAAAAAAAAAAAAAAAAAAAAAAA*A*A |
| 1095 | |
| SEQ ID: | ATGGACGACGACGACAAGttacacctgggaatccAAAAAAAAAAAAAAAAAAAAAAA*A*A |
| 1096 | |
| SEQ ID: | ATGGACGACGACGACAAGctctaccttagtggcgAAAAAAAAAAAAAAAAAAAAAAA*A*A |
| 1097 | |
| SEQ ID: | ATGGACGACGACGACAAGgaattgcggtatcgtcAAAAAAAAAAAAAAAAAAAAAAA*A*A |
| 1098 | |
| SEQ ID: | ATGGACGACGACGACAAGgcctcaacgcaacacaAAAAAAAAAAAAAAAAAAAAAAA*A*A |
| 1099 | |
| SEQ ID: | ATGGACGACGACGACAAGagcgactacagctgagAAAAAAAAAAAAAAAAAAAAAAA*A*A |
| 1100 | |
| SEQ ID: | ATGGACGACGACGACAAGacacacgcaaaacagtAAAAAAAAAAAAAAAAAAAAAAA*A*A |
| 1101 | |
| SEQ ID: | ATGGACGACGACGACAAGgactaagctgcaatccAAAAAAAAAAAAAAAAAAAAAAA*A*A |
| 1102 | |
| SEQ ID: | ATGGACGACGACGACAAGcatacggcgatcttagAAAAAAAAAAAAAAAAAAAAAAA*A*A |
| 1103 | |
| SEQ ID: | ATGGACGACGACGACAAGtatcgtcctatgttcgAAAAAAAAAAAAAAAAAAAAAAA*A*A |
| 1104 | |
| SEQ ID: | ATGGACGACGACGACAAGtaggtccttgggaatgAAAAAAAAAAAAAAAAAAAAAAA*A*A |
| 1105 | |
| SEQ ID: | ATGGACGACGACGACAAGctgagactagcactacAAAAAAAAAAAAAAAAAAAAAAA*A*A |
| 1106 | |
| SEQ ID: | ATGGACGACGACGACAAGgcgtttgagcatccatAAAAAAAAAAAAAAAAAAAAAAA*A*A |
| 1107 | |
| SEQ ID: | ATGGACGACGACGACAAGtaacccaacgcaacctAAAAAAAAAAAAAAAAAAAAAAA*A*A |
| 1108 | |
| SEQ ID: | ATGGACGACGACGACAAGggagttacgcatctggAAAAAAAAAAAAAAAAAAAAAAA*A*A |
| 1109 | |
| SEQ ID: | ATGGACGACGACGACAAGtttgggctcggcctatAAAAAAAAAAAAAAAAAAAAAAA*A*A |
| 1110 | |
| SEQ ID: | ATGGACGACGACGACAAGatgatgagtggaagggAAAAAAAAAAAAAAAAAAAAAAA*A*A |
| 1111 | |
| SEQ ID: | ATGGACGACGACGACAAGgtcagagcactcaaatAAAAAAAAAAAAAAAAAAAAAAA*A*A |
| 1112 | |
| SEQ ID: | ATGGACGACGACGACAAGtgcaagaaacaggcagAAAAAAAAAAAAAAAAAAAAAAA*A*A |
| 1113 | |
| SEQ ID: | ATGGACGACGACGACAAGatggcgttcaggcttcAAAAAAAAAAAAAAAAAAAAAAA*A*A |
| 1114 | |
| SEQ ID: | ATGGACGACGACGACAAGgtttagtcgcgatagcAAAAAAAAAAAAAAAAAAAAAAA*A*A |
| 1115 | |
| SEQ ID: | ATGGACGACGACGACAAGcgcagacccaatgcatAAAAAAAAAAAAAAAAAAAAAAA*A*A |
| 1116 | |
| SEQ ID: | ATGGACGACGACGACAAGtgaaatagtagcgaccAAAAAAAAAAAAAAAAAAAAAAA*A*A |
| 1117 | |
| SEQ ID: | ATGGACGACGACGACAAGcatcgccggctaaatcAAAAAAAAAAAAAAAAAAAAAAA*A*A |
| 1118 | |
| SEQ ID: | ATGGACGACGACGACAAGatgtacgggctctctcAAAAAAAAAAAAAAAAAAAAAAA*A*A |
| 1119 | |
| SEQ ID: | ATGGACGACGACGACAAGccccgttaacatatggAAAAAAAAAAAAAAAAAAAAAAA*A*A |
| 1120 | |
| SEQ ID: | ATGGACGACGACGACAAGgactcgttggcgctatAAAAAAAAAAAAAAAAAAAAAAA*A*A |
| 1121 | |
| SEQ ID: | ATGGACGACGACGACAAGgcccagacctttaggaAAAAAAAAAAAAAAAAAAAAAAA*A*A |
| 1122 | |
| SEQ ID: | ATGGACGACGACGACAAGtcccaacaattaccctAAAAAAAAAAAAAAAAAAAAAAA*A*A |
| 1123 | |
| SEQ ID: | ATGGACGACGACGACAAGcctgtgtgcatctgctAAAAAAAAAAAAAAAAAAAAAAA*A*A |
| 1124 | |
| SEQ ID: | ATGGACGACGACGACAAGggccgttccttggtaaAAAAAAAAAAAAAAAAAAAAAAA*A*A |
| 1125 | |
| SEQ ID: | ATGGACGACGACGACAAGagagtaggttgtgttgAAAAAAAAAAAAAAAAAAAAAAA*A*A |
| 1126 | |
| SEQ ID: | ATGGACGACGACGACAAGactcgataataggacgAAAAAAAAAAAAAAAAAAAAAAA*A*A |
| 1127 | |
| SEQ ID: | ATGGACGACGACGACAAGcccgacgaatggttatAAAAAAAAAAAAAAAAAAAAAAA*A*A |
| 1128 | |
| SEQ ID: | ATGGACGACGACGACAAGcgaccgaatcattcccAAAAAAAAAAAAAAAAAAAAAAA*A*A |
| 1129 | |
| SEQ ID: | ATGGACGACGACGACAAGgcctgtagactttgcaAAAAAAAAAAAAAAAAAAAAAAA*A*A |
| 1130 | |
| SEQ ID: | ATGGACGACGACGACAAGggatccaatacacctaAAAAAAAAAAAAAAAAAAAAAAA*A*A |
| 1131 | |
| SEQ ID: | ATGGACGACGACGACAAGgggagcgaattgtggaAAAAAAAAAAAAAAAAAAAAAAA*A*A |
| 1132 | |
| SEQ ID: | ATGGACGACGACGACAAGcgaccttacggcatgaAAAAAAAAAAAAAAAAAAAAAAA*A*A |
| 1133 | |
| SEQ ID: | ATGGACGACGACGACAAGccgtcacttacgtataAAAAAAAAAAAAAAAAAAAAAAA*A*A |
| 1134 | |
| SEQ ID: | ATGGACGACGACGACAAGcgcagtttcacgtaacAAAAAAAAAAAAAAAAAAAAAAA*A*A |
| 1135 | |
| SEQ ID: | ATGGACGACGACGACAAGggcaagctgaatctacAAAAAAAAAAAAAAAAAAAAAAA*A*A |
| 1136 | |
| SEQ ID: | ATGGACGACGACGACAAGtgcggctacattgccaAAAAAAAAAAAAAAAAAAAAAAA*A*A |
| 1137 | |
| SEQ ID: | ATGGACGACGACGACAAGatcttctcagtcttcgAAAAAAAAAAAAAAAAAAAAAAA*A*A |
| 1138 | |
| SEQ ID: | ATGGACGACGACGACAAGgcaggaagatagtcgtAAAAAAAAAAAAAAAAAAAAAAA*A*A |
| 1139 | |
| SEQ ID: | ATGGACGACGACGACAAGgtgatgtgtctgatacAAAAAAAAAAAAAAAAAAAAAAA*A*A |
| 1140 | |
| SEQ ID: | ATGGACGACGACGACAAGcgtagccaaagtcgtgAAAAAAAAAAAAAAAAAAAAAAA*A*A |
| 1141 | |
| SEQ ID: | ATGGACGACGACGACAAGacttcacggaactacgAAAAAAAAAAAAAAAAAAAAAAA*A*A |
| 1142 | |
| SEQ ID: | ATGGACGACGACGACAAGcgacaaggtatcagttAAAAAAAAAAAAAAAAAAAAAAA*A*A |
| 1143 | |
| SEQ ID: | ATGGACGACGACGACAAGgtatctagggaagtccAAAAAAAAAAAAAAAAAAAAAAA*A*A |
| 1144 | |
| SEQ ID: | ATGGACGACGACGACAAGaagtcagcgaggcgttAAAAAAAAAAAAAAAAAAAAAAA*A*A |
| 1145 | |
| SEQ ID: | ATGGACGACGACGACAAGcgtgtgaccatgatgaAAAAAAAAAAAAAAAAAAAAAAA*A*A |
| 1146 | |
| SEQ ID: | ATGGACGACGACGACAAGacaaagctttcaggctAAAAAAAAAAAAAAAAAAAAAAA*A*A |
| 1147 | |
| SEQ ID: | ATGGACGACGACGACAAGttagtcgtcacatcgcAAAAAAAAAAAAAAAAAAAAAAA*A*A |
| 1148 | |
| SEQ ID: | ATGGACGACGACGACAAGctagaacatgcttcgtAAAAAAAAAAAAAAAAAAAAAAA*A*A |
| 1149 | |
| SEQ ID: | ATGGACGACGACGACAAGagaaacaacgtcaaggAAAAAAAAAAAAAAAAAAAAAAA*A*A |
| 1150 | |
| SEQ ID: | ATGGACGACGACGACAAGtctgtactagctgcacAAAAAAAAAAAAAAAAAAAAAAA*A*A |
| 1151 | |
| SEQ ID: | ATGGACGACGACGACAAGtgcgcattgatggttgAAAAAAAAAAAAAAAAAAAAAAA*A*A |
| 1152 | |
| SEQ ID: | ATGGACGACGACGACAAGtctacccgactttcccAAAAAAAAAAAAAAAAAAAAAAA*A*A |
| 1153 | |
| SEQ ID: | ATGGACGACGACGACAAGtcgcttgtttgcttcaAAAAAAAAAAAAAAAAAAAAAAA*A*A |
| 1154 | |
| SEQ ID: | ATGGACGACGACGACAAGccggtcaagcagtacaAAAAAAAAAAAAAAAAAAAAAAA*A*A |
| 1155 | |
| SEQ ID: | ATGGACGACGACGACAAGttctttgaggcactagAAAAAAAAAAAAAAAAAAAAAAA*A*A |
| 1156 | |
| SEQ ID: | ATGGACGACGACGACAAGaaaagcacagttgcctAAAAAAAAAAAAAAAAAAAAAAA*A*A |
| 1157 | |
| SEQ ID: | ATGGACGACGACGACAAGcttctacctcgaggatAAAAAAAAAAAAAAAAAAAAAAA*A*A |
| 1158 | |
| SEQ ID: | ATGGACGACGACGACAAGggttccaaccttatcaAAAAAAAAAAAAAAAAAAAAAAA*A*A |
| 1159 | |
| SEQ ID: | ATGGACGACGACGACAAGctatgaccgggtgttcAAAAAAAAAAAAAAAAAAAAAAA*A*A |
| 1160 | |
| SEQ ID: | ATGGACGACGACGACAAGgagatcaggagttctaAAAAAAAAAAAAAAAAAAAAAAA*A*A |
| 1161 | |
| SEQ ID: | ATGGACGACGACGACAAGcggagatctgcagactAAAAAAAAAAAAAAAAAAAAAAA*A*A |
| 1162 | |
| SEQ ID: | ATGGACGACGACGACAAGtcttgcgatatgtctcAAAAAAAAAAAAAAAAAAAAAAA*A*A |
| 1163 | |
| SEQ ID: | ATGGACGACGACGACAAGctgtaacaactcggttAAAAAAAAAAAAAAAAAAAAAAA*A*A |
| 1164 | |
| SEQ ID: | ATGGACGACGACGACAAGggttacacgacttgctAAAAAAAAAAAAAAAAAAAAAAA*A*A |
| 1165 | |
| SEQ ID: | ATGGACGACGACGACAAGagagggaacattcgtcAAAAAAAAAAAAAAAAAAAAAAA*A*A |
| 1166 | |
| SEQ ID: | ATGGACGACGACGACAAGgggtattgaacaaacgAAAAAAAAAAAAAAAAAAAAAAA*A*A |
| 1167 | |
| SEQ ID: | ATGGACGACGACGACAAGagtgccagactggcaaAAAAAAAAAAAAAAAAAAAAAAA*A*A |
| 1168 | |
| SEQ ID: | ATGGACGACGACGACAAGggtagatgacgaggagAAAAAAAAAAAAAAAAAAAAAAA*A*A |
| 1169 | |
| SEQ ID: | ATGGACGACGACGACAAGcgtcaattctcagccgAAAAAAAAAAAAAAAAAAAAAAA*A*A |
| 1170 | |
| SEQ ID: | ATGGACGACGACGACAAGacgggagtaagtgtcaAAAAAAAAAAAAAAAAAAAAAAA*A*A |
| 1171 | |
| SEQ ID: | ATGGACGACGACGACAAGaacacttccagtgtcaAAAAAAAAAAAAAAAAAAAAAAA*A*A |
| 1172 | |
| SEQ ID: | ATGGACGACGACGACAAGcatggcggccatttcaAAAAAAAAAAAAAAAAAAAAAAA*A*A |
| 1173 | |
| SEQ ID: | ATGGACGACGACGACAAGgctgatctggattgccAAAAAAAAAAAAAAAAAAAAAAA*A*A |
| 1174 | |
| SEQ ID: | ATGGACGACGACGACAAGcgttaagtgcggtcctAAAAAAAAAAAAAAAAAAAAAAA*A*A |
| 1175 | |
| SEQ ID: | ATGGACGACGACGACAAGgcccatagtgaaacggAAAAAAAAAAAAAAAAAAAAAAA*A*A |
| 1176 | |
| SEQ ID: | ATGGACGACGACGACAAGcagaataggcaagcttAAAAAAAAAAAAAAAAAAAAAAA*A*A |
| 1177 | |
| SEQ ID: | ATGGACGACGACGACAAGtcatcgcacgactgttAAAAAAAAAAAAAAAAAAAAAAA*A*A |
| 1178 | |
| SEQ ID: | ATGGACGACGACGACAAGtccacacttgctagggAAAAAAAAAAAAAAAAAAAAAAA*A*A |
| 1179 | |
| SEQ ID: | ATGGACGACGACGACAAGtaataatagcacgcccAAAAAAAAAAAAAAAAAAAAAAA*A*A |
| 1180 | |
| SEQ ID: | ATGGACGACGACGACAAGgttcaacgccgcttacAAAAAAAAAAAAAAAAAAAAAAA*A*A |
| 1181 | |
| SEQ ID: | ATGGACGACGACGACAAGtcgagctattcccataAAAAAAAAAAAAAAAAAAAAAAA*A*A |
| 1182 | |
| SEQ ID: | ATGGACGACGACGACAAGtcccagtctggacatcAAAAAAAAAAAAAAAAAAAAAAA*A*A |
| 1183 | |
| SEQ ID: | ATGGACGACGACGACAAGccgagatcaaacttcgAAAAAAAAAAAAAAAAAAAAAAA*A*A |
| 1184 | |
| SEQ ID: | ATGGACGACGACGACAAGacgctctaatcgtcgcAAAAAAAAAAAAAAAAAAAAAAA*A*A |
| 1185 | |
| SEQ ID: | ATGGACGACGACGACAAGggtgttaacgagaacgAAAAAAAAAAAAAAAAAAAAAAA*A*A |
| 1186 | |
| SEQ ID: | ATGGACGACGACGACAAGctctatacgggtcagaAAAAAAAAAAAAAAAAAAAAAAA*A*A |
| 1187 | |
| SEQ ID: | ATGGACGACGACGACAAGcatctcccctgtcattAAAAAAAAAAAAAAAAAAAAAAA*A*A |
| 1188 | |
| SEQ ID: | ATGGACGACGACGACAAGgcagatgtgtcggttgAAAAAAAAAAAAAAAAAAAAAAA*A*A |
| 1189 | |
| SEQ ID: | ATGGACGACGACGACAAGacgaacttcccttatgAAAAAAAAAAAAAAAAAAAAAAA*A*A |
| 1190 | |
| SEQ ID: | ATGGACGACGACGACAAGgagtcactccgtcactAAAAAAAAAAAAAAAAAAAAAAA*A*A |
| 1191 | |
| SEQ ID: | ATGGACGACGACGACAAGttcgagacgtgagcgtAAAAAAAAAAAAAAAAAAAAAAA*A*A |
| 1192 | |
| SEQ ID: | ATGGACGACGACGACAAGaatactgtggcacctcAAAAAAAAAAAAAAAAAAAAAAA*A*A |
| 1193 | |
| SEQ ID: | ATGGACGACGACGACAAGcaaagttcagtgtgagAAAAAAAAAAAAAAAAAAAAAAA*A*A |
| 1194 | |
| SEQ ID: | ATGGACGACGACGACAAGatttgccattgccttcAAAAAAAAAAAAAAAAAAAAAAA*A*A |
| 1195 | |
| SEQ ID: | ATGGACGACGACGACAAGacgtaccatatgcgatAAAAAAAAAAAAAAAAAAAAAAA*A*A |
| 1196 | |
| SEQ ID: | ATGGACGACGACGACAAGcccagtcgggaattatAAAAAAAAAAAAAAAAAAAAAAA*A*A |
| 1197 | |
| SEQ ID: | ATGGACGACGACGACAAGgcaatatctatgggccAAAAAAAAAAAAAAAAAAAAAAA*A*A |
| 1198 | |
| SEQ ID: | ATGGACGACGACGACAAGcttgtcctcaagtgagAAAAAAAAAAAAAAAAAAAAAAA*A*A |
| 1199 | |
| SEQ ID: | ATGGACGACGACGACAAGttgctaaacatgggcaAAAAAAAAAAAAAAAAAAAAAAA*A*A |
| 1200 | |
| SEQ ID: | ATGGACGACGACGACAAGtcagagtctaataggcAAAAAAAAAAAAAAAAAAAAAAA*A*A |
| 1201 | |
| SEQ ID: | ATGGACGACGACGACAAGgtggttcccgtttgatAAAAAAAAAAAAAAAAAAAAAAA*A*A |
| 1202 | |
| SEQ ID: | ATGGACGACGACGACAAGgtgtcctgatagggatAAAAAAAAAAAAAAAAAAAAAAA*A*A |
| 1203 | |
| SEQ ID: | ATGGACGACGACGACAAGcttttccagcataccgAAAAAAAAAAAAAAAAAAAAAAA*A*A |
| 1204 | |
| SEQ ID: | ATGGACGACGACGACAAGagtcacggatttctagAAAAAAAAAAAAAAAAAAAAAAA*A*A |
| 1205 | |
| SEQ ID: | ATGGACGACGACGACAAGatgggtcacaaccagtAAAAAAAAAAAAAAAAAAAAAAA*A*A |
| 1206 | |
| SEQ ID: | ATGGACGACGACGACAAGgcacaggacagtaactAAAAAAAAAAAAAAAAAAAAAAA*A*A |
| 1207 | |
| SEQ ID: | ATGGACGACGACGACAAGcatctacaacggaacaAAAAAAAAAAAAAAAAAAAAAAA*A*A |
| 1208 | |
| SEQ ID: | ATGGACGACGACGACAAGataagaccgtaaaggcAAAAAAAAAAAAAAAAAAAAAAA*A*A |
| 1209 | |
| SEQ ID: | ATGGACGACGACGACAAGgctcgcttcgctagttAAAAAAAAAAAAAAAAAAAAAAA*A*A |
| 1210 | |
| SEQ ID: | ATGGACGACGACGACAAGgaaagcctataccactAAAAAAAAAAAAAAAAAAAAAAA*A*A |
| 1211 | |
| SEQ ID: | ATGGACGACGACGACAAGggtaaagacggtgtccAAAAAAAAAAAAAAAAAAAAAAA*A*A |
| 1212 | |
| SEQ ID: | ATGGACGACGACGACAAGttgttcggcctgaggtAAAAAAAAAAAAAAAAAAAAAAA*A*A |
| 1213 | |
| SEQ ID: | ATGGACGACGACGACAAGgtcggctagagaacacAAAAAAAAAAAAAAAAAAAAAAA*A*A |
| 1214 | |
| SEQ ID: | ATGGACGACGACGACAAGagagtccgtgcgatatAAAAAAAAAAAAAAAAAAAAAAA*A*A |
| 1215 | |
| SEQ ID: | ATGGACGACGACGACAAGatatcgcgcagtaccaAAAAAAAAAAAAAAAAAAAAAAA*A*A |
| 1216 | |
| SEQ ID: | ATGGACGACGACGACAAGcaaagctacgggctttAAAAAAAAAAAAAAAAAAAAAAA*A*A |
| 1217 | |
| SEQ ID: | ATGGACGACGACGACAAGaccgcaaaccacatttAAAAAAAAAAAAAAAAAAAAAAA*A*A |
| 1218 | |
| SEQ ID: | ATGGACGACGACGACAAGcggttaagctgattgtAAAAAAAAAAAAAAAAAAAAAAA*A*A |
| 1219 | |
| SEQ ID: | ATGGACGACGACGACAAGtttgtctcacgtccagAAAAAAAAAAAAAAAAAAAAAAA*A*A |
| 1220 | |
| SEQ ID: | ATGGACGACGACGACAAGcttccgcgagcaaaagAAAAAAAAAAAAAAAAAAAAAAA*A*A |
| 1221 | |
| SEQ ID: | ATGGACGACGACGACAAGcaagtcggatctactaAAAAAAAAAAAAAAAAAAAAAAA*A*A |
| 1222 | |
| SEQ ID: | ATGGACGACGACGACAAGaatactcgcgacggctAAAAAAAAAAAAAAAAAAAAAAA*A*A |
| 1223 | |
| SEQ ID: | ATGGACGACGACGACAAGcgcctatcgccgttttAAAAAAAAAAAAAAAAAAAAAAA*A*A |
| 1224 | |
| SEQ ID: | ATGGACGACGACGACAAGgtttactactacacgcAAAAAAAAAAAAAAAAAAAAAAA*A*A |
| 1225 | |
| SEQ ID: | ATGGACGACGACGACAAGgttaaggttacgtcacAAAAAAAAAAAAAAAAAAAAAAA*A*A |
| 1226 | |
| SEQ ID: | ATGGACGACGACGACAAGagctgttcacacgaccAAAAAAAAAAAAAAAAAAAAAAA*A*A |
| 1227 | |
| SEQ ID: | ATGGACGACGACGACAAGcaatactctctggcatAAAAAAAAAAAAAAAAAAAAAAA*A*A |
| 1228 | |
| SEQ ID: | ATGGACGACGACGACAAGttccagtgcatgcgttAAAAAAAAAAAAAAAAAAAAAAA*A*A |
| 1229 | |
| SEQ ID: | ATGGACGACGACGACAAGtgccttttccccgcatAAAAAAAAAAAAAAAAAAAAAAA*A*A |
| 1230 | |
| SEQ ID: | ATGGACGACGACGACAAGcctaacccaaggaagcAAAAAAAAAAAAAAAAAAAAAAA*A*A |
| 1231 | |
| SEQ ID: | ATGGACGACGACGACAAGtagtcttacatctccgAAAAAAAAAAAAAAAAAAAAAAA*A*A |
| 1232 | |
| SEQ ID: | ATGGACGACGACGACAAGctagggtaggctatagAAAAAAAAAAAAAAAAAAAAAAA*A*A |
| 1233 | |
| SEQ ID: | ATGGACGACGACGACAAGtcttgtggaggcttttAAAAAAAAAAAAAAAAAAAAAAA*A*A |
| 1234 | |
| SEQ ID: | ATGGACGACGACGACAAGggaacgagaattacgtAAAAAAAAAAAAAAAAAAAAAAA*A*A |
| 1235 | |
| SEQ ID: | ATGGACGACGACGACAAGggtaagaaatgcttggAAAAAAAAAAAAAAAAAAAAAAA*A*A |
| 1236 | |
| SEQ ID: | ATGGACGACGACGACAAGagtcttcaccaactcaAAAAAAAAAAAAAAAAAAAAAAA*A*A |
| 1237 | |
| SEQ ID: | ATGGACGACGACGACAAGtcaacaaagccttgctAAAAAAAAAAAAAAAAAAAAAAA*A*A |
| 1238 | |
| SEQ ID: | ATGGACGACGACGACAAGggttgctagctctaagAAAAAAAAAAAAAAAAAAAAAAA*A*A |
| 1239 | |
| SEQ ID: | ATGGACGACGACGACAAGcttaccttgttcacctAAAAAAAAAAAAAAAAAAAAAAA*A*A |
| 1240 | |
| SEQ ID: | ATGGACGACGACGACAAGaacatgtagaggggtgAAAAAAAAAAAAAAAAAAAAAAA*A*A |
| 1241 | |
| SEQ ID: | ATGGACGACGACGACAAGttgggttccttcacttAAAAAAAAAAAAAAAAAAAAAAA*A*A |
| 1242 | |
| SEQ ID: | ATGGACGACGACGACAAGgcaccatgctacagtgAAAAAAAAAAAAAAAAAAAAAAA*A*A |
| 1243 | |
| SEQ ID: | ATGGACGACGACGACAAGatgcatgagaaagggaAAAAAAAAAAAAAAAAAAAAAAA*A*A |
| 1244 | |
| SEQ ID: | ATGGACGACGACGACAAGccactagtgagatagaAAAAAAAAAAAAAAAAAAAAAAA*A*A |
| 1245 | |
| SEQ ID: | ATGGACGACGACGACAAGcgacacaccaatattgAAAAAAAAAAAAAAAAAAAAAAA*A*A |
| 1246 | |
| SEQ ID: | ATGGACGACGACGACAAGcagatagtcttgtcacAAAAAAAAAAAAAAAAAAAAAAA*A*A |
| 1247 | |
| SEQ ID: | ATGGACGACGACGACAAGttgtcgagggatacttAAAAAAAAAAAAAAAAAAAAAAA*A*A |
| 1248 | |
| SEQ ID: | ATGGACGACGACGACAAGcgttgagcacctttgcAAAAAAAAAAAAAAAAAAAAAAA*A*A |
| 1249 | |
| SEQ ID: | ATGGACGACGACGACAAGaacagagaagaatcgcAAAAAAAAAAAAAAAAAAAAAAA*A*A |
| 1250 | |
| SEQ ID: | ATGGACGACGACGACAAGgcgtgcttgtactccaAAAAAAAAAAAAAAAAAAAAAAA*A*A |
| 1251 | |
| SEQ ID: | ATGGACGACGACGACAAGttcacgcctcattgatAAAAAAAAAAAAAAAAAAAAAAA*A*A |
| 1252 | |
| SEQ ID: | ATGGACGACGACGACAAGccggcatccgttatacAAAAAAAAAAAAAAAAAAAAAAA*A*A |
| 1253 | |
| SEQ ID: | ATGGACGACGACGACAAGtgagcgttaaccagatAAAAAAAAAAAAAAAAAAAAAAA*A*A |
| 1254 | |
| SEQ ID: | ATGGACGACGACGACAAGtgccgattagcctacgAAAAAAAAAAAAAAAAAAAAAAA*A*A |
| 1255 | |
| SEQ ID: | ATGGACGACGACGACAAGtgttcgtgtggcgcatAAAAAAAAAAAAAAAAAAAAAAA*A*A |
| 1256 | |
| SEQ ID: | ATGGACGACGACGACAAGaccggtagcttatcacAAAAAAAAAAAAAAAAAAAAAAA*A*A |
| 1257 | |
| SEQ ID: | ATGGACGACGACGACAAGacgggagctcactgatAAAAAAAAAAAAAAAAAAAAAAA*A*A |
| 1258 | |
| SEQ ID: | ATGGACGACGACGACAAGgtataactcgagagctAAAAAAAAAAAAAAAAAAAAAAA*A*A |
| 1259 | |
| SEQ ID: | ATGGACGACGACGACAAGcccatcggttatccctAAAAAAAAAAAAAAAAAAAAAAA*A*A |
| 1260 | |
| SEQ ID: | ATGGACGACGACGACAAGagacatgccccgctatAAAAAAAAAAAAAAAAAAAAAAA*A*A |
| 1261 | |
| SEQ ID: | ATGGACGACGACGACAAGgtttctaatcgtccgcAAAAAAAAAAAAAAAAAAAAAAA*A*A |
| 1262 | |
| SEQ ID: | ATGGACGACGACGACAAGgaatgaagcttcgacaAAAAAAAAAAAAAAAAAAAAAAA*A*A |
| 1263 | |
| SEQ ID: | ATGGACGACGACGACAAGgcgattgacccattgaAAAAAAAAAAAAAAAAAAAAAAA*A*A |
| 1264 | |
| SEQ ID: | ATGGACGACGACGACAAGgttggtcctctagagaAAAAAAAAAAAAAAAAAAAAAAA*A*A |
| 1265 | |
| SEQ ID: | ATGGACGACGACGACAAGttgttattcgcccctcAAAAAAAAAAAAAAAAAAAAAAA*A*A |
| 1266 | |
| SEQ ID: | ATGGACGACGACGACAAGattggtgtgtagagctAAAAAAAAAAAAAAAAAAAAAAA*A*A |
| 1267 | |
| SEQ ID: | ATGGACGACGACGACAAGtgccggatgtaattgcAAAAAAAAAAAAAAAAAAAAAAA*A*A |
| 1268 | |
| SEQ ID: | ATGGACGACGACGACAAGagaaacgaaacgttcgAAAAAAAAAAAAAAAAAAAAAAA*A*A |
| 1269 | |
| SEQ ID: | ATGGACGACGACGACAAGcccaaggatggtgctaAAAAAAAAAAAAAAAAAAAAAAA*A*A |
| 1270 | |
| SEQ ID: | ATGGACGACGACGACAAGggaatgggcgagttcaAAAAAAAAAAAAAAAAAAAAAAA*A*A |
| 1271 | |
| SEQ ID: | ATGGACGACGACGACAAGccagcttacccgtattAAAAAAAAAAAAAAAAAAAAAAA*A*A |
| 1272 | |
| SEQ ID: | ATGGACGACGACGACAAGtacgctttaccgtcccAAAAAAAAAAAAAAAAAAAAAAA*A*A |
| 1273 | |
| SEQ ID: | ATGGACGACGACGACAAGgcgcttcgattctattAAAAAAAAAAAAAAAAAAAAAAA*A*A |
| 1274 | |
| SEQ ID: | ATGGACGACGACGACAAGgcaagtgtgggaacgtAAAAAAAAAAAAAAAAAAAAAAA*A*A |
| 1275 | |
| SEQ ID: | ATGGACGACGACGACAAGgaagctcaattggccaAAAAAAAAAAAAAAAAAAAAAAA*A*A |
| 1276 | |
| SEQ ID: | ATGGACGACGACGACAAGttttccaccctgcatcAAAAAAAAAAAAAAAAAAAAAAA*A*A |
| 1277 | |
| SEQ ID: | ATGGACGACGACGACAAGgtcttcgggtgagtttAAAAAAAAAAAAAAAAAAAAAAA*A*A |
| 1278 | |
| SEQ ID: | ATGGACGACGACGACAAGagaatgctgctggtttAAAAAAAAAAAAAAAAAAAAAAA*A*A |
| 1279 | |
| SEQ ID: | ATGGACGACGACGACAAGtgcatcacgttagacgAAAAAAAAAAAAAAAAAAAAAAA*A*A |
| 1280 | |
| SEQ ID: | ATGGACGACGACGACAAGtcgttgccatgaactcAAAAAAAAAAAAAAAAAAAAAAA*A*A |
| 1281 | |
| SEQ ID: | ATGGACGACGACGACAAGtgacgcttgccatctaAAAAAAAAAAAAAAAAAAAAAAA*A*A |
| 1282 | |
| SEQ ID: | ATGGACGACGACGACAAGggcctgtaaggattacAAAAAAAAAAAAAAAAAAAAAAA*A*A |
| 1283 | |
| SEQ ID: | ATGGACGACGACGACAAGgccgattcgattcactAAAAAAAAAAAAAAAAAAAAAAA*A*A |
| 1284 | |
| SEQ ID: | ATGGACGACGACGACAAGggagaaccagaacgacAAAAAAAAAAAAAAAAAAAAAAA*A*A |
| 1285 | |
| SEQ ID: | ATGGACGACGACGACAAGaacgccttttacgtgtAAAAAAAAAAAAAAAAAAAAAAA*A*A |
| 1286 | |
| SEQ ID: | ATGGACGACGACGACAAGaagtcccctctactgcAAAAAAAAAAAAAAAAAAAAAAA*A*A |
| 1287 | |
| SEQ ID: | ATGGACGACGACGACAAGacattcaggtccctccAAAAAAAAAAAAAAAAAAAAAAA*A*A |
| 1288 | |
| SEQ ID: | ATGGACGACGACGACAAGtaggggatggttctggAAAAAAAAAAAAAAAAAAAAAAA*A*A |
| 1289 | |
| SEQ ID: | ATGGACGACGACGACAAGcaagtggatggagaggAAAAAAAAAAAAAAAAAAAAAAA*A*A |
| 1290 | |
| SEQ ID: | ATGGACGACGACGACAAGgctctctacaaaggggAAAAAAAAAAAAAAAAAAAAAAA*A*A |
| 1291 | |
| SEQ ID: | ATGGACGACGACGACAAGgtacaatagacgagtcAAAAAAAAAAAAAAAAAAAAAAA*A*A |
| 1292 | |
| SEQ ID: | ATGGACGACGACGACAAGctaaagtcatcctgccAAAAAAAAAAAAAAAAAAAAAAA*A*A |
| 1293 | |
| SEQ ID: | ATGGACGACGACGACAAGcctattgtactcctcgAAAAAAAAAAAAAAAAAAAAAAA*A*A |
| 1294 | |
| SEQ ID: | ATGGACGACGACGACAAGtatgacgctgtaggcgAAAAAAAAAAAAAAAAAAAAAAA*A*A |
| 1295 | |
| SEQ ID: | ATGGACGACGACGACAAGgctaggtctgactgtcAAAAAAAAAAAAAAAAAAAAAAA*A*A |
| 1296 | |
| SEQ ID: | ATGGACGACGACGACAAGtccagagaatgtgagtAAAAAAAAAAAAAAAAAAAAAAA*A*A |
| 1297 | |
| SEQ ID: | ATGGACGACGACGACAAGtgcttcagtcacagtaAAAAAAAAAAAAAAAAAAAAAAA*A*A |
| 1298 | |
| SEQ ID: | ATGGACGACGACGACAAGttggtgactccgacctAAAAAAAAAAAAAAAAAAAAAAA*A*A |
| 1299 | |
| SEQ ID: | ATGGACGACGACGACAAGgcttcccattcatactAAAAAAAAAAAAAAAAAAAAAAA*A*A |
| 1300 | |
| SEQ ID: | ATGGACGACGACGACAAGtatgtcaactcgcgggAAAAAAAAAAAAAAAAAAAAAAA*A*A |
| 1301 | |
| SEQ ID: | ATGGACGACGACGACAAGaccaacggcttcttgaAAAAAAAAAAAAAAAAAAAAAAA*A*A |
| 1302 | |
| SEQ ID: | ATGGACGACGACGACAAGgtccacccaccatattAAAAAAAAAAAAAAAAAAAAAAA*A*A |
| 1303 | |
| SEQ ID: | ATGGACGACGACGACAAGaaagatcccggctataAAAAAAAAAAAAAAAAAAAAAAA*A*A |
| 1304 | |
| SEQ ID: | ATGGACGACGACGACAAGgggacatcgtttaacaAAAAAAAAAAAAAAAAAAAAAAA*A*A |
| 1305 | |
| SEQ ID: | ATGGACGACGACGACAAGctcgtgcatccacgtaAAAAAAAAAAAAAAAAAAAAAAA*A*A |
| 1306 | |
| SEQ ID: | ATGGACGACGACGACAAGaccggactctggtactAAAAAAAAAAAAAAAAAAAAAAA*A*A |
| 1307 | |
| SEQ ID: | ATGGACGACGACGACAAGctgtagtgcgcagtatAAAAAAAAAAAAAAAAAAAAAAA*A*A |
| 1308 | |
| SEQ ID: | ATGGACGACGACGACAAGacacttcggtgacctgAAAAAAAAAAAAAAAAAAAAAAA*A*A |
| 1309 | |
| SEQ ID: | ATGGACGACGACGACAAGtactgcttccgactgaAAAAAAAAAAAAAAAAAAAAAAA*A*A |
| 1310 | |
| SEQ ID: | ATGGACGACGACGACAAGgtttcagcccaaacttAAAAAAAAAAAAAAAAAAAAAAA*A*A |
| 1311 | |
| SEQ ID: | ATGGACGACGACGACAAGcgtactgacctcgagtAAAAAAAAAAAAAAAAAAAAAAA*A*A |
| 1312 | |
| SEQ ID: | ATGGACGACGACGACAAGgcgtcaaacttttgagAAAAAAAAAAAAAAAAAAAAAAA*A*A |
| 1313 | |
| SEQ ID: | ATGGACGACGACGACAAGatccctttggatccctAAAAAAAAAAAAAAAAAAAAAAA*A*A |
| 1314 | |
| SEQ ID: | ATGGACGACGACGACAAGcttcgttgttcatcgtAAAAAAAAAAAAAAAAAAAAAAA*A*A |
| 1315 | |
| SEQ ID: | ATGGACGACGACGACAAGcgtctaggataccataAAAAAAAAAAAAAAAAAAAAAAA*A*A |
| 1316 | |
| SEQ ID: | ATGGACGACGACGACAAGctaagccaaatctcgcAAAAAAAAAAAAAAAAAAAAAAA*A*A |
| 1317 | |
| SEQ ID: | ATGGACGACGACGACAAGggacgtagagcactagAAAAAAAAAAAAAAAAAAAAAAA*A*A |
| 1318 | |
| SEQ ID: | ATGGACGACGACGACAAGacccctgatagatcttAAAAAAAAAAAAAAAAAAAAAAA*A*A |
| 1319 | |
| SEQ ID: | ATGGACGACGACGACAAGagcactgcggtttgttAAAAAAAAAAAAAAAAAAAAAAA*A*A |
| 1320 | |
| SEQ ID: | ATGGACGACGACGACAAGcgctctatgtaggaatAAAAAAAAAAAAAAAAAAAAAAA*A*A |
| 1321 | |
| SEQ ID: | ATGGACGACGACGACAAGctttgataccatgggaAAAAAAAAAAAAAAAAAAAAAAA*A*A |
| 1322 | |
| SEQ ID: | ATGGACGACGACGACAAGccaccaccatcttctgAAAAAAAAAAAAAAAAAAAAAAA*A*A |
| 1323 | |
| SEQ ID: | ATGGACGACGACGACAAGcagtcgtattgggaccAAAAAAAAAAAAAAAAAAAAAAA*A*A |
| 1324 | |
| SEQ ID: | ATGGACGACGACGACAAGggtgtacatctgttgtAAAAAAAAAAAAAAAAAAAAAAA*A*A |
| 1325 | |
| SEQ ID: | ATGGACGACGACGACAAGcttgtggagagtcgatAAAAAAAAAAAAAAAAAAAAAAA*A*A |
| 1326 | |
| SEQ ID: | ATGGACGACGACGACAAGactttaagcccgcgttAAAAAAAAAAAAAAAAAAAAAAA*A*A |
| 1327 | |
| SEQ ID: | ATGGACGACGACGACAAGgaaaacggtcttccgaAAAAAAAAAAAAAAAAAAAAAAA*A*A |
| 1328 | |
| SEQ ID: | ATGGACGACGACGACAAGcctcactcgtgtttccAAAAAAAAAAAAAAAAAAAAAAA*A*A |
| 1329 | |
| SEQ ID: | ATGGACGACGACGACAAGgttacatccggccagtAAAAAAAAAAAAAAAAAAAAAAA*A*A |
| 1330 | |
| SEQ ID: | ATGGACGACGACGACAAGtccgagataatctaggAAAAAAAAAAAAAAAAAAAAAAA*A*A |
| 1331 | |
| SEQ ID: | ATGGACGACGACGACAAGgcactatcacctcagaAAAAAAAAAAAAAAAAAAAAAAA*A*A |
| 1332 | |
| SEQ ID: | ATGGACGACGACGACAAGtcaggaggtcgtacctAAAAAAAAAAAAAAAAAAAAAAA*A*A |
| 1333 | |
| SEQ ID: | ATGGACGACGACGACAAGaattgtgctcatcgggAAAAAAAAAAAAAAAAAAAAAAA*A*A |
| 1334 | |
| SEQ ID: | ATGGACGACGACGACAAGcggcccgattctaatcAAAAAAAAAAAAAAAAAAAAAAA*A*A |
| 1335 | |
| SEQ ID: | ATGGACGACGACGACAAGtgtatggcagcaagacAAAAAAAAAAAAAAAAAAAAAAA*A*A |
| 1336 | |
| SEQ ID: | ATGGACGACGACGACAAGcaaagaccgacgaattAAAAAAAAAAAAAAAAAAAAAAA*A*A |
| 1337 | |
| SEQ ID: | ATGGACGACGACGACAAGgtgcctctgttcatggAAAAAAAAAAAAAAAAAAAAAAA*A*A |
| 1338 | |
| SEQ ID: | ATGGACGACGACGACAAGgaacgaagtggtagtcAAAAAAAAAAAAAAAAAAAAAAA*A*A |
| 1339 | |
| SEQ ID: | ATGGACGACGACGACAAGgtctcgactagatttgAAAAAAAAAAAAAAAAAAAAAAA*A*A |
| 1340 | |
| SEQ ID: | ATGGACGACGACGACAAGcactcccgaatggtgtAAAAAAAAAAAAAAAAAAAAAAA*A*A |
| 1341 | |
| SEQ ID: | ATGGACGACGACGACAAGaagaaagataaccgcgAAAAAAAAAAAAAAAAAAAAAAA*A*A |
| 1342 | |
| SEQ ID: | ATGGACGACGACGACAAGaaccagagggagggatAAAAAAAAAAAAAAAAAAAAAAA*A*A |
| 1343 | |
| SEQ ID: | ATGGACGACGACGACAAGgctgtcgctacgaattAAAAAAAAAAAAAAAAAAAAAAA*A*A |
| 1344 | |
| SEQ ID: | ATGGACGACGACGACAAGtctcccactggtgactAAAAAAAAAAAAAAAAAAAAAAA*A*A |
| 1345 | |
| SEQ ID: | ATGGACGACGACGACAAGcagactaggaggagagAAAAAAAAAAAAAAAAAAAAAAA*A*A |
| 1346 | |
| SEQ ID: | ATGGACGACGACGACAAGgcagacaggacatcagAAAAAAAAAAAAAAAAAAAAAAA*A*A |
| 1347 | |
| SEQ ID: | ATGGACGACGACGACAAGtccatggaagtgtaccAAAAAAAAAAAAAAAAAAAAAAA*A*A |
| 1348 | |
| SEQ ID: | ATGGACGACGACGACAAGgtcattgactgtagtcAAAAAAAAAAAAAAAAAAAAAAA*A*A |
| 1349 | |
| SEQ ID: | ATGGACGACGACGACAAGctcggaccttttctcgAAAAAAAAAAAAAAAAAAAAAAA*A*A |
| 1350 | |
| SEQ ID: | ATGGACGACGACGACAAGtgctgatggtaaaccgAAAAAAAAAAAAAAAAAAAAAAA*A*A |
| 1351 | |
| SEQ ID: | ATGGACGACGACGACAAGggctttcggtggtacaAAAAAAAAAAAAAAAAAAAAAAA*A*A |
| 1352 | |
| SEQ ID: | ATGGACGACGACGACAAGcacatccaaccagcacAAAAAAAAAAAAAAAAAAAAAAA*A*A |
| 1353 | |
| SEQ ID: | ATGGACGACGACGACAAGaccatcccgaaacgagAAAAAAAAAAAAAAAAAAAAAAA*A*A |
| 1354 | |
| SEQ ID: | ATGGACGACGACGACAAGgagctacctcacattaAAAAAAAAAAAAAAAAAAAAAAA*A*A |
| 1355 | |
| SEQ ID: | ATGGACGACGACGACAAGgatagtaccatgcgttAAAAAAAAAAAAAAAAAAAAAAA*A*A |
| 1356 | |
| SEQ ID: | ATGGACGACGACGACAAGgacataggaggtcatgAAAAAAAAAAAAAAAAAAAAAAA*A*A |
| 1357 | |
| SEQ ID: | ATGGACGACGACGACAAGtgtcgtatcactatccAAAAAAAAAAAAAAAAAAAAAAA*A*A |
| 1358 | |
| SEQ ID: | ATGGACGACGACGACAAGctgcaagtgggcgaatAAAAAAAAAAAAAAAAAAAAAAA*A*A |
| 1359 | |
| SEQ ID: | ATGGACGACGACGACAAGagatccgataacgtacAAAAAAAAAAAAAAAAAAAAAAA*A*A |
| 1360 | |
| SEQ ID: | ATGGACGACGACGACAAGattgtaggtgcccaccAAAAAAAAAAAAAAAAAAAAAAA*A*A |
| 1361 | |
| SEQ ID: | ATGGACGACGACGACAAGaaagtaacaacgggagAAAAAAAAAAAAAAAAAAAAAAA*A*A |
| 1362 | |
| SEQ ID: | ATGGACGACGACGACAAGtttccaatttgcgctcAAAAAAAAAAAAAAAAAAAAAAA*A*A |
| 1363 | |
| SEQ ID: | ATGGACGACGACGACAAGttgcagctctctcgagAAAAAAAAAAAAAAAAAAAAAAA*A*A |
| 1364 | |
| SEQ ID: | ATGGACGACGACGACAAGaccatccttgcatttcAAAAAAAAAAAAAAAAAAAAAAA*A*A |
| 1365 | |
| SEQ ID: | ATGGACGACGACGACAAGtcctcggtttgtccagAAAAAAAAAAAAAAAAAAAAAAA*A*A |
| 1366 | |
| SEQ ID: | ATGGACGACGACGACAAGtactcatccgtgaactAAAAAAAAAAAAAAAAAAAAAAA*A*A |
| 1367 | |
| SEQ ID: | ATGGACGACGACGACAAGtgttacctagtccctgAAAAAAAAAAAAAAAAAAAAAAA*A*A |
| 1368 | |
| SEQ ID: | ATGGACGACGACGACAAGacctataacgtgggcgAAAAAAAAAAAAAAAAAAAAAAA*A*A |
| 1369 | |
| SEQ ID: | ATGGACGACGACGACAAGcaaggttgctgtgtgcAAAAAAAAAAAAAAAAAAAAAAA*A*A |
| 1370 | |
| SEQ ID: | ATGGACGACGACGACAAGacgcagttgcacacttAAAAAAAAAAAAAAAAAAAAAAA*A*A |
| 1371 | |
| SEQ ID: | ATGGACGACGACGACAAGaagggtcaggtgaggaAAAAAAAAAAAAAAAAAAAAAAA*A*A |
| 1372 | |
| SEQ ID: | ATGGACGACGACGACAAGtgttgaggctgcaggaAAAAAAAAAAAAAAAAAAAAAAA*A*A |
| 1373 | |
| SEQ ID: | ATGGACGACGACGACAAGgtccgagtgtattctgAAAAAAAAAAAAAAAAAAAAAAA*A*A |
| 1374 | |
| SEQ ID: | ATGGACGACGACGACAAGtcaagaacctagcgagAAAAAAAAAAAAAAAAAAAAAAA*A*A |
| 1375 | |
| SEQ ID: | ATGGACGACGACGACAAGtcttatatgaggcgtgAAAAAAAAAAAAAAAAAAAAAAA*A*A |
| 1376 | |
| SEQ ID: | ATGGACGACGACGACAAGttatgtcgcgttccgtAAAAAAAAAAAAAAAAAAAAAAA*A*A |
| 1377 | |
| SEQ ID: | ATGGACGACGACGACAAGcattgctcagccacacAAAAAAAAAAAAAAAAAAAAAAA*A*A |
| 1378 | |
| SEQ ID: | ATGGACGACGACGACAAGtttatgcacacttgccAAAAAAAAAAAAAAAAAAAAAAA*A*A |
| 1379 | |
| SEQ ID: | ATGGACGACGACGACAAGagttatcgggcacgatAAAAAAAAAAAAAAAAAAAAAAA*A*A |
| 1380 | |
| SEQ ID: | ATGGACGACGACGACAAGttggcatcccgattctAAAAAAAAAAAAAAAAAAAAAAA*A*A |
| 1381 | |
| SEQ ID: | ATGGACGACGACGACAAGaatgtacgaagtccctAAAAAAAAAAAAAAAAAAAAAAA*A*A |
| 1382 | |
| SEQ ID: | ATGGACGACGACGACAAGgatgaatggccttcttAAAAAAAAAAAAAAAAAAAAAAA*A*A |
| 1383 | |
| SEQ ID: | ATGGACGACGACGACAAGaaacgtcaacctcgccAAAAAAAAAAAAAAAAAAAAAAA*A*A |
| 1384 | |
| SEQ ID: | ATGGACGACGACGACAAGcacgttcgccagaaatAAAAAAAAAAAAAAAAAAAAAAA*A*A |
| 1385 | |
| SEQ ID: | ATGGACGACGACGACAAGcagatctaaatgcacgAAAAAAAAAAAAAAAAAAAAAAA*A*A |
| 1386 | |
| SEQ ID: | ATGGACGACGACGACAAGattctcgcaactgtctAAAAAAAAAAAAAAAAAAAAAAA*A*A |
| 1387 | |
| SEQ ID: | ATGGACGACGACGACAAGagcatggttcccaactAAAAAAAAAAAAAAAAAAAAAAA*A*A |
| 1388 | |
| SEQ ID: | ATGGACGACGACGACAAGagggaatgcttgatctAAAAAAAAAAAAAAAAAAAAAAA*A*A |
| 1389 | |
| SEQ ID: | ATGGACGACGACGACAAGccccacagtattcagcAAAAAAAAAAAAAAAAAAAAAAA*A*A |
| 1390 | |
| SEQ ID: | ATGGACGACGACGACAAGagcgtactggacaagcAAAAAAAAAAAAAAAAAAAAAAA*A*A |
| 1391 | |
| SEQ ID: | ATGGACGACGACGACAAGcggttcatcgttgaccAAAAAAAAAAAAAAAAAAAAAAA*A*A |
| 1392 | |
| SEQ ID: | ATGGACGACGACGACAAGgggtgtactaggtaatAAAAAAAAAAAAAAAAAAAAAAA*A*A |
| 1393 | |
| SEQ ID: | ATGGACGACGACGACAAGccatctggattagactAAAAAAAAAAAAAAAAAAAAAAA*A*A |
| 1394 | |
| SEQ ID: | ATGGACGACGACGACAAGgatgcgaagcgcatacAAAAAAAAAAAAAAAAAAAAAAA*A*A |
| 1395 | |
| SEQ ID: | ATGGACGACGACGACAAGcataccacgcctatgtAAAAAAAAAAAAAAAAAAAAAAA*A*A |
| 1396 | |
| SEQ ID: | ATGGACGACGACGACAAGgaagtggtcttcaggtAAAAAAAAAAAAAAAAAAAAAAA*A*A |
| 1397 | |
| SEQ ID: | ATGGACGACGACGACAAGtcgctgagccgcaaatAAAAAAAAAAAAAAAAAAAAAAA*A*A |
| 1398 | |
| SEQ ID: | ATGGACGACGACGACAAGttatggagcctgttcgAAAAAAAAAAAAAAAAAAAAAAA*A*A |
| 1399 | |
| SEQ ID: | ATGGACGACGACGACAAGgaagcccataggaggtAAAAAAAAAAAAAAAAAAAAAAA*A*A |
| 1400 | |
| SEQ ID: | ATGGACGACGACGACAAGgccgtgacagtggtttAAAAAAAAAAAAAAAAAAAAAAA*A*A |
| 1401 | |
| SEQ ID: | ATGGACGACGACGACAAGaagtcgacctctatcgAAAAAAAAAAAAAAAAAAAAAAA*A*A |
| 1402 | |
| SEQ ID: | ATGGACGACGACGACAAGcattgactttcgagcgAAAAAAAAAAAAAAAAAAAAAAA*A*A |
| 1403 | |
| SEQ ID: | ATGGACGACGACGACAAGattaaacagggagctgAAAAAAAAAAAAAAAAAAAAAAA*A*A |
| 1404 | |
| SEQ ID: | ATGGACGACGACGACAAGacaatccgaggtctgaAAAAAAAAAAAAAAAAAAAAAAA*A*A |
| 1405 | |
| SEQ ID: | ATGGACGACGACGACAAGgaagggcaaggtttctAAAAAAAAAAAAAAAAAAAAAAA*A*A |
| 1406 | |
| SEQ ID: | ATGGACGACGACGACAAGgtggaaaaccgagataAAAAAAAAAAAAAAAAAAAAAAA*A*A |
| 1407 | |
| SEQ ID: | ATGGACGACGACGACAAGaccattactcgtaagcAAAAAAAAAAAAAAAAAAAAAAA*A*A |
| 1408 | |
| SEQ ID: | ATGGACGACGACGACAAGcgtccgatgacctcttAAAAAAAAAAAAAAAAAAAAAAA*A*A |
| 1409 | |
| SEQ ID: | ATGGACGACGACGACAAGtgtggcgcttacaaacAAAAAAAAAAAAAAAAAAAAAAA*A*A |
| 1410 | |
| SEQ ID: | ATGGACGACGACGACAAGattcacatgtgcaggaAAAAAAAAAAAAAAAAAAAAAAA*A*A |
| 1411 | |
| SEQ ID: | ATGGACGACGACGACAAGctaccacacaagctccAAAAAAAAAAAAAAAAAAAAAAA*A*A |
| 1412 | |
| SEQ ID: | ATGGACGACGACGACAAGggatggtaattcgcttAAAAAAAAAAAAAAAAAAAAAAA*A*A |
| 1413 | |
| SEQ ID: | ATGGACGACGACGACAAGttcaaaggtttgacgcAAAAAAAAAAAAAAAAAAAAAAA*A*A |
| 1414 | |
| SEQ ID: | ATGGACGACGACGACAAGgtctgcagcaatctctAAAAAAAAAAAAAAAAAAAAAAA*A*A |
| 1415 | |
| SEQ ID: | ATGGACGACGACGACAAGgacagtcgtaactgggAAAAAAAAAAAAAAAAAAAAAAA*A*A |
| 1416 | |
| SEQ ID: | ATGGACGACGACGACAAGagtgcttgtaaagagcAAAAAAAAAAAAAAAAAAAAAAA*A*A |
| 1417 | |
| SEQ ID: | ATGGACGACGACGACAAGgtaggagctgcctttgAAAAAAAAAAAAAAAAAAAAAAA*A*A |
| 1418 | |
| SEQ ID: | ATGGACGACGACGACAAGccactttcgtagacatAAAAAAAAAAAAAAAAAAAAAAA*A*A |
| 1419 | |
| SEQ ID: | ATGGACGACGACGACAAGtgattagcgtggttacAAAAAAAAAAAAAAAAAAAAAAA*A*A |
| 1420 | |
| SEQ ID: | ATGGACGACGACGACAAGaaaggcagtaagaaccAAAAAAAAAAAAAAAAAAAAAAA*A*A |
| 1421 | |
| SEQ ID: | ATGGACGACGACGACAAGcgtagtttagggcccaAAAAAAAAAAAAAAAAAAAAAAA*A*A |
| 1422 | |
| SEQ ID: | ATGGACGACGACGACAAGgtcataatcccgttccAAAAAAAAAAAAAAAAAAAAAAA*A*A |
| 1423 | |
| SEQ ID: | ATGGACGACGACGACAAGttgatacgttccctggAAAAAAAAAAAAAAAAAAAAAAA*A*A |
| 1424 | |
| SEQ ID: | ATGGACGACGACGACAAGaacgataggatcgcgaAAAAAAAAAAAAAAAAAAAAAAA*A*A |
| 1425 | |
| SEQ ID: | ATGGACGACGACGACAAGagaatttagggcgcctAAAAAAAAAAAAAAAAAAAAAAA*A*A |
| 1426 | |
| SEQ ID: | ATGGACGACGACGACAAGctagcatttagacccaAAAAAAAAAAAAAAAAAAAAAAA*A*A |
| 1427 | |
| SEQ ID: | ATGGACGACGACGACAAGaccgtttgacggtttgAAAAAAAAAAAAAAAAAAAAAAA*A*A |
| 1428 | |
| SEQ ID: | ATGGACGACGACGACAAGgtggtagcatgctagcAAAAAAAAAAAAAAAAAAAAAAA*A*A |
| 1429 | |
| SEQ ID: | ATGGACGACGACGACAAGctgtttcgtaccagtcAAAAAAAAAAAAAAAAAAAAAAA*A*A |
| 1430 | |
| SEQ ID: | ATGGACGACGACGACAAGattacgtccgagagagAAAAAAAAAAAAAAAAAAAAAAA*A*A |
| 1431 | |
| SEQ ID: | ATGGACGACGACGACAAGggacttattcgacactAAAAAAAAAAAAAAAAAAAAAAA*A*A |
| 1432 | |
| SEQ ID: | ATGGACGACGACGACAAGccattgacaggacgagAAAAAAAAAAAAAAAAAAAAAAA*A*A |
| 1433 | |
| SEQ ID: | ATGGACGACGACGACAAGagcgtgaaatcgtgctAAAAAAAAAAAAAAAAAAAAAAA*A*A |
| 1434 | |
| SEQ ID: | ATGGACGACGACGACAAGctggttataaggggttAAAAAAAAAAAAAAAAAAAAAAA*A*A |
| 1435 | |
| SEQ ID: | ATGGACGACGACGACAAGctgcgcatccgtactaAAAAAAAAAAAAAAAAAAAAAAA*A*A |
| 1436 | |
| SEQ ID: | ATGGACGACGACGACAAGatcccacagcctaatgAAAAAAAAAAAAAAAAAAAAAAA*A*A |
| 1437 | |
| SEQ ID: | ATGGACGACGACGACAAGatgcgtaatcaggaacAAAAAAAAAAAAAAAAAAAAAAA*A*A |
| 1438 | |
| SEQ ID: | ATGGACGACGACGACAAGacgccgtgaactgaacAAAAAAAAAAAAAAAAAAAAAAA*A*A |
| 1439 | |
| SEQ ID: | ATGGACGACGACGACAAGatagcccggcaatgcaAAAAAAAAAAAAAAAAAAAAAAA*A*A |
| 1440 | |
| SEQ ID: | ATGGACGACGACGACAAGcacctcaaagtcagccAAAAAAAAAAAAAAAAAAAAAAA*A*A |
| 1441 | |
| SEQ ID: | ATGGACGACGACGACAAGttccaaggacgtggaaAAAAAAAAAAAAAAAAAAAAAAA*A*A |
| 1442 | |
| SEQ ID: | ATGGACGACGACGACAAGagagagatgctaaccgAAAAAAAAAAAAAAAAAAAAAAA*A*A |
| 1443 | |
| SEQ ID: | ATGGACGACGACGACAAGgttccggaactgtcctAAAAAAAAAAAAAAAAAAAAAAA*A*A |
| 1444 | |
| SEQ ID: | ATGGACGACGACGACAAGggatggtcctgaatccAAAAAAAAAAAAAAAAAAAAAAA*A*A |
| 1445 | |
| SEQ ID: | ATGGACGACGACGACAAGattttggcggtgggtcAAAAAAAAAAAAAAAAAAAAAAA*A*A |
| 1446 | |
| SEQ ID: | ATGGACGACGACGACAAGaatcgattgcgtacggAAAAAAAAAAAAAAAAAAAAAAA*A*A |
| 1447 | |
| SEQ ID: | ATGGACGACGACGACAAGtggagccgttattacgAAAAAAAAAAAAAAAAAAAAAAA*A*A |
| 1448 | |
| SEQ ID: | ATGGACGACGACGACAAGaggcattgtgactggtAAAAAAAAAAAAAAAAAAAAAAA*A*A |
| 1449 | |
| SEQ ID: | ATGGACGACGACGACAAGgactgctgtccaaaatAAAAAAAAAAAAAAAAAAAAAAA*A*A |
| 1450 | |
| SEQ ID: | ATGGACGACGACGACAAGccctttgcgtcccattAAAAAAAAAAAAAAAAAAAAAAA*A*A |
| 1451 | |
| SEQ ID: | ATGGACGACGACGACAAGttgcaagcggctaccaAAAAAAAAAAAAAAAAAAAAAAA*A*A |
| 1452 | |
| SEQ ID: | ATGGACGACGACGACAAGttggcgcatttatcggAAAAAAAAAAAAAAAAAAAAAAA*A*A |
| 1453 | |
| SEQ ID: | ATGGACGACGACGACAAGcaacatcttaggtctcAAAAAAAAAAAAAAAAAAAAAAA*A*A |
| 1454 | |
| SEQ ID: | ATGGACGACGACGACAAGgtaatccgtcaggagtAAAAAAAAAAAAAAAAAAAAAAA*A*A |
| 1455 | |
| SEQ ID: | ATGGACGACGACGACAAGcactgtcacgtacacaAAAAAAAAAAAAAAAAAAAAAAA*A*A |
| 1456 | |
| SEQ ID: | ATGGACGACGACGACAAGggtgaggggatagtaaAAAAAAAAAAAAAAAAAAAAAAA*A*A |
| 1457 | |
| SEQ ID: | ATGGACGACGACGACAAGatgggcacatattctcAAAAAAAAAAAAAAAAAAAAAAA*A*A |
| 1458 | |
| SEQ ID: | ATGGACGACGACGACAAGaaaacgcctatcactcAAAAAAAAAAAAAAAAAAAAAAA*A*A |
| 1459 | |
| SEQ ID: | ATGGACGACGACGACAAGctctctttgatccgtaAAAAAAAAAAAAAAAAAAAAAAA*A*A |
| 1460 | |
| SEQ ID: | ATGGACGACGACGACAAGcttacgaggctaccgaAAAAAAAAAAAAAAAAAAAAAAA*A*A |
| 1461 | |
| SEQ ID: | ATGGACGACGACGACAAGtgtctagctgaggcaaAAAAAAAAAAAAAAAAAAAAAAA*A*A |
| 1462 | |
| SEQ ID: | ATGGACGACGACGACAAGgtaggacagatccgcaAAAAAAAAAAAAAAAAAAAAAAA*A*A |
| 1463 | |
| SEQ ID: | ATGGACGACGACGACAAGgtacccatgtcttaacAAAAAAAAAAAAAAAAAAAAAAA*A*A |
| 1464 | |
| SEQ ID: | ATGGACGACGACGACAAGagacctctcggtgaatAAAAAAAAAAAAAAAAAAAAAAA*A*A |
| 1465 | |
| SEQ ID: | ATGGACGACGACGACAAGgggtcgattcacttgaAAAAAAAAAAAAAAAAAAAAAAA*A*A |
| 1466 | |
| SEQ ID: | ATGGACGACGACGACAAGtcgatacgccaaggtgAAAAAAAAAAAAAAAAAAAAAAA*A*A |
| 1467 | |
| SEQ ID: | ATGGACGACGACGACAAGtgtttgtagccgcctgAAAAAAAAAAAAAAAAAAAAAAA*A*A |
| 1468 | |
| SEQ ID: | ATGGACGACGACGACAAGaattctgcctcctcaaAAAAAAAAAAAAAAAAAAAAAAA*A*A |
| 1469 | |
| SEQ ID: | ATGGACGACGACGACAAGctccgaaaagttgcagAAAAAAAAAAAAAAAAAAAAAAA*A*A |
| 1470 | |
| SEQ ID: | ATGGACGACGACGACAAGaagccggtcatagcctAAAAAAAAAAAAAAAAAAAAAAA*A*A |
| 1471 | |
| SEQ ID: | ATGGACGACGACGACAAGcatcagtaggtgacgcAAAAAAAAAAAAAAAAAAAAAAA*A*A |
| 1472 | |
| SEQ ID: | ATGGACGACGACGACAAGaatcggcgcattgggaAAAAAAAAAAAAAAAAAAAAAAA*A*A |
| 1473 | |
| SEQ ID: | ATGGACGACGACGACAAGgaaattgaggtcctgcAAAAAAAAAAAAAAAAAAAAAAA*A*A |
| 1474 | |
| SEQ ID: | ATGGACGACGACGACAAGacctgcgtgactcttgAAAAAAAAAAAAAAAAAAAAAAA*A*A |
| 1475 | |
| SEQ ID: | ATGGACGACGACGACAAGgcgcgggtaatcatacAAAAAAAAAAAAAAAAAAAAAAA*A*A |
| 1476 | |
| SEQ ID: | ATGGACGACGACGACAAGtcttaggctttcgtgcAAAAAAAAAAAAAAAAAAAAAAA*A*A |
| 1477 | |
| SEQ ID: | ATGGACGACGACGACAAGccgaagacactgtcgtAAAAAAAAAAAAAAAAAAAAAAA*A*A |
| 1478 | |
| SEQ ID: | ATGGACGACGACGACAAGtcatttccccgcctctAAAAAAAAAAAAAAAAAAAAAAA*A*A |
| 1479 | |
| SEQ ID: | ATGGACGACGACGACAAGccttgtgcgtatgtaaAAAAAAAAAAAAAAAAAAAAAAA*A*A |
| 1480 | |
| SEQ ID: | ATGGACGACGACGACAAGtgcgttggtctaaaggAAAAAAAAAAAAAAAAAAAAAAA*A*A |
| 1481 | |
| SEQ ID: | ATGGACGACGACGACAAGccctactaacaatgtcAAAAAAAAAAAAAAAAAAAAAAA*A*A |
| 1482 | |
| SEQ ID: | ATGGACGACGACGACAAGtcctcttagcttgggcAAAAAAAAAAAAAAAAAAAAAAA*A*A |
| 1483 | |
| SEQ ID: | ATGGACGACGACGACAAGctcttacccgcgataaAAAAAAAAAAAAAAAAAAAAAAA*A*A |
| 1484 | |
| SEQ ID: | ATGGACGACGACGACAAGtctgttgggttgtccgAAAAAAAAAAAAAAAAAAAAAAA*A*A |
| 1485 | |
| SEQ ID: | ATGGACGACGACGACAAGagaagtggtcttagacAAAAAAAAAAAAAAAAAAAAAAA*A*A |
| 1486 | |
| SEQ ID: | ATGGACGACGACGACAAGtcagaacaagtcatgcAAAAAAAAAAAAAAAAAAAAAAA*A*A |
| 1487 | |
| SEQ ID: | ATGGACGACGACGACAAGaatccatcggccagtaAAAAAAAAAAAAAAAAAAAAAAA*A*A |
| 1488 | |
| SEQ ID: | ATGGACGACGACGACAAGtcatcagaagcggaagAAAAAAAAAAAAAAAAAAAAAAA*A*A |
| 1489 | |
| SEQ ID: | ATGGACGACGACGACAAGcgttaggttggactacAAAAAAAAAAAAAAAAAAAAAAA*A*A |
| 1490 | |
| SEQ ID: | ATGGACGACGACGACAAGgattagcatcccgaggAAAAAAAAAAAAAAAAAAAAAAA*A*A |
| 1491 | |
| SEQ ID: | ATGGACGACGACGACAAGtacctgaatagtcacgAAAAAAAAAAAAAAAAAAAAAAA*A*A |
| 1492 | |
| SEQ ID: | ATGGACGACGACGACAAGagaaccgcatgtcaccAAAAAAAAAAAAAAAAAAAAAAA*A*A |
| 1493 | |
| SEQ ID: | ATGGACGACGACGACAAGcgattcatatggaccgAAAAAAAAAAAAAAAAAAAAAAA*A*A |
| 1494 | |
| SEQ ID: | ATGGACGACGACGACAAGgaacgaggcctattgtAAAAAAAAAAAAAAAAAAAAAAA*A*A |
| 1495 | |
| SEQ ID: | ATGGACGACGACGACAAGtgggagatatgtaaccAAAAAAAAAAAAAAAAAAAAAAA*A*A |
| 1496 | |
| SEQ ID: | ATGGACGACGACGACAAGttctgaaaacgaagccAAAAAAAAAAAAAAAAAAAAAAA*A*A |
| 1497 | |
| SEQ ID: | ATGGACGACGACGACAAGagtctctttatgacccAAAAAAAAAAAAAAAAAAAAAAA*A*A |
| 1498 | |
| SEQ ID: | ATGGACGACGACGACAAGgagctagtaagacgccAAAAAAAAAAAAAAAAAAAAAAA*A*A |
| 1499 | |
| SEQ ID: | ATGGACGACGACGACAAGaccggtccttcgactaAAAAAAAAAAAAAAAAAAAAAAA*A*A |
| 1500 | |
| SEQ ID: | ATGGACGACGACGACAAGaaatgacgggcgtcacAAAAAAAAAAAAAAAAAAAAAAA*A*A |
| 1501 | |
| SEQ ID: | ATGGACGACGACGACAAGtctcggacccaatcctAAAAAAAAAAAAAAAAAAAAAAA*A*A |
| 1502 | |
| SEQ ID: | ATGGACGACGACGACAAGccatggatcaaaggccAAAAAAAAAAAAAAAAAAAAAAA*A*A |
| 1503 | |
| SEQ ID: | ATGGACGACGACGACAAGtcggtatgtgaatcccAAAAAAAAAAAAAAAAAAAAAAA*A*A |
| 1504 | |
| SEQ ID: | ATGGACGACGACGACAAGggttcatgatcgtatcAAAAAAAAAAAAAAAAAAAAAAA*A*A |
| 1505 | |
| SEQ ID: | ATGGACGACGACGACAAGtaagattctccccttcAAAAAAAAAAAAAAAAAAAAAAA*A*A |
| 1506 | |
| SEQ ID: | ATGGACGACGACGACAAGaaatctaactgccgtgAAAAAAAAAAAAAAAAAAAAAAA*A*A |
| 1507 | |
| SEQ ID: | ATGGACGACGACGACAAGtactgatcatttccgcAAAAAAAAAAAAAAAAAAAAAAA*A*A |
| 1508 | |
| SEQ ID: | ATGGACGACGACGACAAGgtaggatcacggcgttAAAAAAAAAAAAAAAAAAAAAAA*A*A |
| 1509 | |
| SEQ ID: | ATGGACGACGACGACAAGcttgatgtcgtcaatcAAAAAAAAAAAAAAAAAAAAAAA*A*A |
| 1510 | |
| SEQ ID: | ATGGACGACGACGACAAGggaagtctagcgagtcAAAAAAAAAAAAAAAAAAAAAAA*A*A |
| 1511 | |
| SEQ ID: | ATGGACGACGACGACAAGtctctgctcgaggagtAAAAAAAAAAAAAAAAAAAAAAA*A*A |
| 1512 | |
| SEQ ID: | ATGGACGACGACGACAAGctttgcacgagagccaAAAAAAAAAAAAAAAAAAAAAAA*A*A |
| 1513 | |
| SEQ ID: | ATGGACGACGACGACAAGactttaccaatggcgaAAAAAAAAAAAAAAAAAAAAAAA*A*A |
| 1514 | |
| SEQ ID: | ATGGACGACGACGACAAGgcagaatagcgactcgAAAAAAAAAAAAAAAAAAAAAAA*A*A |
| 1515 | |
| SEQ ID: | ATGGACGACGACGACAAGcgaacgttgcgtttggAAAAAAAAAAAAAAAAAAAAAAA*A*A |
| 1516 | |
| SEQ ID: | ATGGACGACGACGACAAGtgaagtctcgaagtgaAAAAAAAAAAAAAAAAAAAAAAA*A*A |
| 1517 | |
| SEQ ID: | ATGGACGACGACGACAAGcccttgggcataaaacAAAAAAAAAAAAAAAAAAAAAAA*A*A |
| 1518 | |
| SEQ ID: | ATGGACGACGACGACAAGggctagcagttgagtgAAAAAAAAAAAAAAAAAAAAAAA*A*A |
| 1519 | |
| SEQ ID: | ATGGACGACGACGACAAGatgggctatggtggtaAAAAAAAAAAAAAAAAAAAAAAA*A*A |
| 1520 | |
| SEQ ID: | ATGGACGACGACGACAAGtaccactaggaatcagAAAAAAAAAAAAAAAAAAAAAAA*A*A |
| 1521 | |
| SEQ ID: | ATGGACGACGACGACAAGacataggggcattgagAAAAAAAAAAAAAAAAAAAAAAA*A*A |
| 1522 | |
| SEQ ID: | ATGGACGACGACGACAAGgttcatagatagcgcaAAAAAAAAAAAAAAAAAAAAAAA*A*A |
| 1523 | |
| SEQ ID: | ATGGACGACGACGACAAGtggctttcctaacagcAAAAAAAAAAAAAAAAAAAAAAA*A*A |
| 1524 | |
| SEQ ID: | ATGGACGACGACGACAAGgaagcgtccatatgacAAAAAAAAAAAAAAAAAAAAAAA*A*A |
| 1525 | |
| SEQ ID: | ATGGACGACGACGACAAGcacaagcgactctttcAAAAAAAAAAAAAAAAAAAAAAA*A*A |
| 1526 | |
| SEQ ID: | ATGGACGACGACGACAAGaagatattccgcgtgcAAAAAAAAAAAAAAAAAAAAAAA*A*A |
| 1527 | |
| SEQ ID: | ATGGACGACGACGACAAGgtccaaatcacaccgtAAAAAAAAAAAAAAAAAAAAAAA*A*A |
| 1528 | |
| SEQ ID: | ATGGACGACGACGACAAGgacgtcatcgtacctgAAAAAAAAAAAAAAAAAAAAAAA*A*A |
| 1529 | |
| SEQ ID: | ATGGACGACGACGACAAGacagctgctgtgcatcAAAAAAAAAAAAAAAAAAAAAAA*A*A |
| 1530 | |
| SEQ ID: | ATGGACGACGACGACAAGttgtaacagtgcaacgAAAAAAAAAAAAAAAAAAAAAAA*A*A |
| 1531 | |
| SEQ ID: | ATGGACGACGACGACAAGagctgttatgcgccgtAAAAAAAAAAAAAAAAAAAAAAA*A*A |
| 1532 | |
| SEQ ID: | ATGGACGACGACGACAAGttgcccaaaaccctgtAAAAAAAAAAAAAAAAAAAAAAA*A*A |
| 1533 | |
| SEQ ID: | ATGGACGACGACGACAAGagctaagtcgctggtaAAAAAAAAAAAAAAAAAAAAAAA*A*A |
| 1534 | |
| SEQ ID: | ATGGACGACGACGACAAGtcctgtaattacgcctAAAAAAAAAAAAAAAAAAAAAAA*A*A |
| 1535 | |
| SEQ ID: | ATGGACGACGACGACAAGcgcctgatcctttgagAAAAAAAAAAAAAAAAAAAAAAA*A*A |
| 1536 | |
| SEQ ID: | ATGGACGACGACGACAAGacctctgtcgagttacAAAAAAAAAAAAAAAAAAAAAAA*A*A |
| 1537 | |
| SEQ ID: | ATGGACGACGACGACAAGgacgttgtagcaggatAAAAAAAAAAAAAAAAAAAAAAA*A*A |
| 1538 | |
| SEQ ID: | ATGGACGACGACGACAAGatggctcaacgaggagAAAAAAAAAAAAAAAAAAAAAAA*A*A |
| 1539 | |
| SEQ ID: | ATGGACGACGACGACAAGagaggtacatgagaggAAAAAAAAAAAAAAAAAAAAAAA*A*A |
| 1540 | |
| SEQ ID: | ATGGACGACGACGACAAGtgacagcccatctcgtAAAAAAAAAAAAAAAAAAAAAAA*A*A |
| 1541 | |
| SEQ ID: | ATGGACGACGACGACAAGtgacaacgccatgtctAAAAAAAAAAAAAAAAAAAAAAA*A*A |
| 1542 | |
| SEQ ID: | ATGGACGACGACGACAAGgggttacaacgtatagAAAAAAAAAAAAAAAAAAAAAAA*A*A |
| 1543 | |
| SEQ ID: | ATGGACGACGACGACAAGcatacgatcacggacgAAAAAAAAAAAAAAAAAAAAAAA*A*A |
| 1544 | |
| SEQ ID: | ATGGACGACGACGACAAGtaccccggctatcaacAAAAAAAAAAAAAAAAAAAAAAA*A*A |
| 1545 | |
| SEQ ID: | ATGGACGACGACGACAAGatgaaactcaccgcaaAAAAAAAAAAAAAAAAAAAAAAA*A*A |
| 1546 | |
| SEQ ID: | ATGGACGACGACGACAAGcctatatccattcctgAAAAAAAAAAAAAAAAAAAAAAA*A*A |
| 1547 | |
| SEQ ID: | ATGGACGACGACGACAAGtagcattaacagcgtgAAAAAAAAAAAAAAAAAAAAAAA*A*A |
| 1548 | |

[0200] Libraries are then prepared from the digested products using a modified Nextera® XT protocol in which custom primers designed to enrich 3′ end are used. The libraries are then sequenced using an ILLUMINA® platform. Gene expression can then be analyzed by determining the total amount of each of the RNAs present, for each cellular barcode present.

[0201] The present methods provide several advantages over previous methods. For example, by using a 384-well PCR plate the reaction volume is decreased (e.g., the volume decreased from 10 μL to 5 μL for reverse transcription and from 25 μL to 10 μL for PCR). Further, by using a restriction enzyme, the current method allows for recovery of about 80-90%, such as 85%, 3′ end sequences that have cell barcode information; a much higher recovery rate compared with other 3′ end selection methods (Table 11).

### VI. Single Cell Gene Expression Analysis, Single Cell RNA Sequencing, and DNA-Labeled Antibody Sequencing

[0202] The present methods for the generation of peptide antigens by IVTT using synthesized oligo nucleotides as the template, which are then loaded to MHC monomers and form DNA-BC pMHC tetramers to stain and sort T cells, can also be combined with single cell gene expression analysis platforms, such as BD BD Rhapsody™ Single-Cell Analysis System, or single cell RNA sequencing (scRNA-seq) platforms, such as 10× genomics Chromium or 1CellBio inDrop or Dolomite Bio Nadia. In addition, methods described here can be combined with DNA-labeled antibody sequencing, such as CITE-seq or REAP-seq (Stoeckius et al., 2017) or the commercially available DNA-labeled antibodies, such as BD Ab-seq products or Biolegend TotalSeq (FIGS. 23-28, Table 1). The method that includes the TetTCR-Seq, single cell gene expression or scRNA-seq, and DNA-labeled antibody sequencing is referred to herein as TetTCR-SeqHD.

[0203] TetTCR-SeqHD methods described here can use peptide encoding oligos desgined in the TetTCR-Seq or peptide encoding oligos with poly A tail added to the 3′end to interface with scRNA-seq protocols that high-throughput scRNA-seq platforms use. A DNA linker oligonucleotide may be used to covalently linked to streptavidin in order to complementary bind peptide-encoding DNA oligonucleotide. This design makes it possible for only annealing to be required to link the peptide-encoding DNA oligonucleotide to the streptavidin. MID or UMI and cell barcodes from high-throught platforms during reverse transcription may be used. Reverse transcription using primers containing polyT in above single cell analysis platforms can generate cDNA of peptide-encoding DNA oligonucleotide for each individual cell. Reverse transcription part of TetTCR-SeqHD is compatible with single cell RNA sequencing protocols, such as Smart-seq and Smart-seq2 protocols (Ramskold et al., 2012).

### VI. Examples

[0204] The following examples are included to demonstrate preferred embodiments of the invention. It should be appreciated by those of skill in the art that the techniques disclosed in the examples which follow represent techniques discovered by the inventor to function well in the practice of the invention, and thus can be considered to constitute preferred modes for its practice. However, those of skill in the art should, in light of the present disclosure, appreciate that many changes can be made in the specific embodiments which are disclosed and still obtain a like or similar result without departing from the spirit and scope of the invention.

### Example 1

### Materials and Methods

[0205] PE/APC-labeled streptavidin conjugation to DNA Linker—Conjugation of a DNA linker comprising a MID sequence (Table 1) to Phycoerythrin (PE)- and Allophycocyanin (APC)-labeled streptavidin was performed following manufacturer's protocols (SoluLink®). Excess unconjugated DNA linker was removed by 6 wash steps in a Vivaspin® 6 100 kDa protein concentrator (GE® Healthcare). Conjugates were concentrated to ˜120 μl, and then passed through a 0.2 μm centrifugal filter. The molar DNA:protein conjugation ratio was kept between 1:3 to 1:7.

[0206] DNA:protein conjugation ratio was determined by absorbance using a 1 mg/ml of PE or APC-labeled streptavidin reference solution. The absorbance of the DNA-streptavidin conjugate was then compared with this standard curve to determine the effective protein concentration of the conjugate. The DNA concentration was determined from the difference in the A260 absorbance between the DNA-streptavidin conjugate and a protein concentration-matched version of the PE/APC streptavidin.

[0207] Overlap extension of the DNA-streptavidin conjugate—Annealing of DNA template to DNA-streptavidin conjugate was done at 55° C. for 5 minutes, then cooled to 25° C. at −0.1° C./s in the presence of 250 μM dNTP in 1× CutSmart® buffer (NEB®). Then, 1 μl of extension mixture consisting of 0.1 μl CutSmart® 10×, and 0.125 μl Klenow Fragment Exo-(5 U/ul, NEB) was added before starting the extension at 37° C. for 1 hour. The reaction is stopped by adding EDTA. The extended DNA-streptavidin conjugate was stored at 4° C. These steps correspond to steps 2.1 and 2.2 in FIG. 1A.

[0208] In vitro transcription/translation—Peptide-encoding DNA templates were purchased from IDT and SIGMA-ALDRICH®. DNA templates were amplified in a 10 μl PCR reaction with 400 μM dNTP, 1 μM IVTT forward primer (Table 1), 1.05 μM IVTT reverse primer (Table 1), 25 μM DNA template, and 0.0375 U/μl TaKaRa Ex Taq® HS DNA Polymerase (TAKARA BIO USA®). The reaction proceeded for 95° C. 3 min, then 30 cycles of 95° C. 20 s, 52° C. 40 s, 72° C. 45 s, then 72° C. 5 min. The PCR product was diluted with 73.3 μl of water. Corresponds to step 1.1 in FIG. 1A.

[0209] 20 μl of 1.5× concentrated PUREXPRESS® IVTT master mix (NEW ENGLAND BIOLABS®) consists of 10 μl Solution A, 7.5 μl solution B, 0.8 μl of Release Factor 1+2+3 (5 reaction/μl, NEB special order), 0.25 μl enterokinase (16 U/μl, NEB), 0.25 μl Murine RNase Inhibitor (40 U/ul, NEB), and 1.2 μl H₂O. 1 μl of the diluted PCR product was added to 2 μl of the IVTT master mix on ice and then incubated at 30° C. for 4 hours. This step corresponds to step 1.2 in FIG. 1A.

[0210] pMHC UV exchange and tetramerization—pMHC UV exchange and tetramerization follows previously described protocol (Rodenko et al., Yu et al., 2015). The UV exchange was performed for 60 minutes on ice, and then incubated at 4° C. for at least 12 hours. Extended DNA-streptavidin conjugate was then added to its corresponding UV-exchanged pMHC monomer mix at molar ratio of 1:6.7 and incubated at 4° C. for 1 hour to generate DNA pMHC tetramers. This step corresponds to step 1.3 in FIG. 1A.

[0211] DNA pMHC tetramer pooling—500 μl of staining buffer (PBS, 5 mM EDTA, 2% FBS, 100 ug/ml salmon sperm DNA, 100 uM d-biotin, 0.05% sodium azide) was added to a 100 kDa VIVASPIN® protein concentrator (GE®) and incubated for at least 30 minutes. The concentrator is spun at 10,000 g and further staining buffer is added until 1 ml of solution have run through the membrane. Immediately prior to cell staining, 0.65 μl of each DNA pMHC tetramer is added to 400 μl of staining buffer, transferred to the concentrator, and then spun at 7,000 g for 10 minutes or longer until the volume reaches ˜50 μl.

[0212] DNA pMHC tetramer staining and sorting of T cells—Human Leukocyte Reduction System (LRS) chambers were obtained from de-identified donors by staff members at We Are Blood. The use of LRS chamber from de-identified donors for this study was approved by the Institutional Review Board of the University of Texas at Austin and was complied with all ethical regulations. CD8⁺ T cell isolation was performed following a previously established protocol (Yu et al., 2015).

[0213] Cells were resuspended into staining buffer containing ˜60 nM of each DNA-BC pMHC tetramer and 0.025 mg/ml of BV785-CD8a (RPA-T8) antibody and incubated for 1 hour at 4° C. In experiments 1 and 2, a HCV-KLV(WT) binding clone was pre-stained with BV605-CD8a and then spiked into the main sample. Tetramer enrichment was performed either on ice or at 4° C. following published protocol (Yu et al., 2015).

[0214] The enriched fraction was eluted off the column and washed into FACS buffer with 0.05% sodium azide, and stained with AF488-CD3, 7-AAD, BV421-CCR7, BV510-CD45RA, and BV785-CD8a (Biolegend). Single cells were sorted using BD FACSARIA™ II into 4 μl lysis buffer following previously published protocol (Zhang et al., 2016).

[0215] T cell receptor and DNA-BC sequencing library preparation—Single cell TCR amplification and sequencing was done following published protocol with a minor modification (Zhang et al., 2016). During the first PCR amplification, primers P1 and P2 (SEQ ID NOs: 4-5) were included in the primer mix at 100 nM final concentration for concurrent amplification of TCR and the DNA-BC from the DNA pMHC tetramer (Table 2).

[0216] 1 μl of first PCR product from the TCR and DNA-BC amplification was combined with 100 nM of a V1f_rxn2 primer (Table 1) and 100 nM of a V1r_rxn2 primer from Table 1, and 0.025 U/μl TAKARA EX TAQ® HS (TAKARA BIO USA®) to 5 μl volume for a second PCR. PCR proceeded at 95° C. 3 minutes, then 10 cycles of 95° C. 20 sec, 55° C. 40 sec, and 72° C. 45 sec, then 72° C. 5 min. These PCR primers include cell barcodes to discriminate between wells, and include partial Illumina adaptor as previously described (Zhang et al., 2016).

[0217] A third PCR was used to add the remaining ILLUMINA® sequencing adaptors using ILLU_f and ILLU_r primers (Table 1). This PCR was identical to that of the prior, except that it only used 5 cycles. Multiple wells are then pooled and purified by gel electrophoresis and gel extraction. Libraries were sequenced on the ILLUMINA® MISEQ® using the V2 kit. The libraries were sequenced to a depth of at least 6000 reads/cell.

[0218] DNA-BC sequence processing—Raw reads were filtered based on the constant region of the DNA-BC. Reads were further separated according to cell barcodes. Within each cell barcode, reads with an identical MID sequence were clustered together and a consensus peptide-encoding sequence was built for each cluster. Each cluster represents one MID count.

[0219] Clusters were filtered based on the peptide-encoding region to be 25-30 nt in length, and with a Levenshtein distance no greater than 2 from the nearest known DNA-BC sequence. A histogram was then created expressing the % of total reads belonging to each group of clusters sharing the same read count. Low read count clusters, which occur due to sequencing errors, were removed (FIG. 9) (Fu et al., 2014). The clusters are then collected into their corresponding cell and peptide based on the cell barcode and peptide-encoding DNA sequence, respectively.

[0220] Calculation of percent cross-reactive T cells for Experiment 3-6: The relative proportion of T cells belonging to the Neo⁺WT⁺, Neo⁻WT⁺, and Neo⁺WT⁻ antigen-binding cell populations was calculated for each Neo-WT antigen pair using cells with positive antigen detection. The analysis was restricted to cells with the one identified antigen in the Neo⁻WT⁺ and Neo⁺WT⁻ sorted populations and the two identified antigens in the Neo⁺WT⁺ sorted population (FIGS. 113E, 15E, 18I). From this dataset, normalization was performed to account for differences in the frequency and number of cells sorted for the three cell populations. Taking these two normalizations into account, the equation for calculating the relative proportion p of cells binding to peptide a in population b for Experiment 3-4 is:

$$p ( {a}_{i} , {b}_{j} ) = \frac{relfreq ( {b}_{j} ) * \frac{count ( {a}_{i} , {b}_{j} )}{totalsort ( {b}_{j} )}}{{\sum }_{b} \frac{relfreq ( b ) count ( {a}_{i} , b )}{totalsort ( b )}}$$

[0221] aᵢ refers to a Neo-WT antigen pair in the Neo⁺WT⁺ population, corresponding WT peptide only in the Neo⁻WT⁺ population, and corresponding Neo peptide only in the Neo⁺WT⁻ population. bⱼ refers to one of the three cell populations Neo⁺WT⁻, Neo⁻WT⁺, or Neo⁺WT⁺. count(aᵢ,bⱼ) refers to the antigen-binding T cell count in cell population bⱼ binding to peptide aᵢ. Relfreq(bⱼ) refers to the percentage of cell population bⱼ taken from the tetramer gating in the tetramer-enriched fraction, which is a measure of the relative cell frequency (FIG. 112A). totalsort(bⱼ) is the total number of cells sorted for cell population bⱼ.

[0222] The percent cross reactive T cells for any Neo-WT antigen pair aᵢ is simply p(aᵢ,b_{Neo+WT+}) (same values as red bars in FIG. 2B). While this calculation can be performed for all Neo-WT antigen pairs, the analysis was restricted to Neo-WT antigen pairs containing at least 3 cells where both the Neo and WT antigen were detected in at least one cell.

[0223] An aggregate analysis was performed for experiment 5-6. Since cells are aggregated from these two experiments, the cell counts were normalized in the three Tetramer⁺ populations but not the cell frequency because the relative frequency of the three cell populations in both experiments were comparable between one another. The altered equation used for Experiment 5-6 is the following:

$$p ( {a}_{i} , {b}_{j} ) = \frac{count ( {a}_{i} , {b}_{j} ) / totalsort ( {b}_{j} )}{{\sum }_{{b}_{1}}^{{b}_{3}} \frac{count ( {a}_{i} , b )}{totalsort ( {b}_{j} )}}$$

[0224] T cell lines and functional assay: T cell lines were generated according to previously published protocol, but using the DNA-BC pMHC tetramer pool. Cells were gated in the same manner as FIG. 8 except for the AF488 channel, where CD3-AF488 was replaced by the dump channel CD4,14,16,19,32,56-AF488. 5 cells from the same population (Neo⁺WT⁻, Neo⁻WT⁺, Neo⁺WT⁺) were sorted into each well. Functional status was analyzed 10-21 days after re-stimulation.

[0225] Functionality was measured and analyzed using the LDH cytotoxicity assay kit (Thermofisher) following manufacturer's instructions as described previously. For FIG. 2G and FIG. 20, T2 cells (ATTC) were pulsed with a peptide pool consisting of either the 20 neoantigen peptides (250 mM total, 12.5 mM each peptide) or 20 wildtype peptides (250 mM total, 12.5 mM each peptide). Background cytotoxicity was subtracted by using T2 cells pulsed with HCV-KLV(WT) peptide (250 mM). For FIG. 21C, T2 cells were pulsed with 12.5 mM of a single peptide or a peptide pool consisting of the 19 indicated neo-antigen or WT peptides at 12.5 mM per peptide. Background cytotoxicity was subtracted by using T2 cells not pulsed with peptide. For each well, 60,000 T cells were incubated with 6,000 peptide-pulsed T2 cells for 4 hours at 37° C. Each condition for each cell line (derived from 5 single sorted cells) was performed in triplicates.

[0226] Lentiviral TCR transduction: Lentivirus production and TCR transduction was performed as previously described with the following modifications. TCR were synthesized as GenParts (GenScript) and was cloned into pLEX_307 (a gift from David Root via Addgene) under EF-1a promoter. The vector also confers puromycin resistance. All vector sequences were confirmed via Sanger sequencing prior to viral production. 72 hours after transduction, expression of the TCR was analyzed by flow cytometry. Antigen binding of the transduced cells was confirmed by pMHC tetramer and anti-CD3 antibody (Biolegend) staining.

[0227] Criteria for peptide classification: MID threshold and signal-to-noise ratio: In order to characterize the non-specific binding level of DNA-BC peptides to T cells, a peptide was defined to be positively binding if the fluorescence intensity of the corresponding pMHC tetramer is above background level, which is set using the flow through fraction after tetramer enrichment. To measure background, fluorescent tetramer negative (Tetramer) single CD8+ T cells were sorted from the tetramer enriched fraction and measured the number of MIDs associated with each of the non-specifically bound peptides. Results show that these non-specific bound DNA-BCs from Tetramer single cells have low MID counts associated with each peptide (FIG. 1D, 13A, 15A, 18A, 18E). Another version of peptide classification is based on MID distribution (FIG. 24D, 27A-B).

[0228] The first criteria that was applied to detect positively bound peptides from background level of non-specific binding is a MID count threshold. This threshold was defined to be the maximum MID count-per-peptide from the Tetramer population with an added 25% buffer, rounded to the nearest tens digit (dashed lines in FIG. 1D, 13A, 15A, 18A, 18E). This value was determined for each TetTCR-Seq experiment.

[0229] The second criteria used for each cell was a signal-to-noise ratio between two borderline peptides, which is defined to be the ratio of the peptide with the lowest MID count above the MID threshold to the peptide with the highest MID count below the MID threshold. The spike-in clone from Experiment 1 was used as the positive control for the MID counts associated with positive and negatively binding peptides, which was validated using traditional tetramer staining (FIG. 1E, 1F, 10A-D). By aggregating all cells from this spike-in clone, the signal-to-noise ratio ranged from 3.6:1 to 61:1. Using this as a guide, the signal-to-noise ratio was set to be greater than 2:1; Cells with a signal-to-noise ratio below this threshold was removed from analysis because the segregation in MID counts between positive and negative binding peptides was too low.

### Example 2

### Establishment of TetTCR-Seq

[0230] To address the challenges associated with prior approaches to TCR analysis, Tetramer Associated TCR Sequencing (TetTCR-Seq) was developed. TetTCR-Seq is a platform for high-throughput pairing of TCR sequence with potentially multiple antigenic pMHC species at single T cell resolution. First, a large library of fluorescently labeled, DNA-barcoded (DNA-BC) pMHC tetramers was constructed in an inexpensive and rapid manner using in vitro transcription/translation (IVTT) (FIG. 1A). Next, tetramer-stained cells were single-cell sorted for concurrent amplification of the DNA-BC and TCRαβ genes in RT-PCR (FIG. 1B). These amplicons were further PCR amplified separately in parallel wells to add the cell barcode and sequencing adapters. A molecular identifier (MID) consisting of 12 random nucleotides (nt) was included in the DNA-BC to provide absolute counting of the copy number for each species of tetramers bound to the cell. Finally, the linking of multiple peptide specificities with their bound TCRα and TCRβ sequences was done using predetermined nucleotide-based cell barcodes. DNA-BC pMHC tetramers are compatible with magnetic enrichment methods for the isolation of rare antigen-binding precursor T cells, making TetTCR-Seq a versatile platform to analyze both clonally expanded and precursor T cells.

[0231] To construct large pMHC libraries via UV-mediated peptide exchange using traditional chemically synthesized peptide is costly with long turnaround times. To solve this problem, TetTCR-Seq utilizes a set of peptide-encoding oligonucleotides that serve as both the DNA-BCs for identifying antigen specificities and DNA templates for peptide generation via IVTT (FIG. 1A). Synthesizing 60 length oligonucleotides is less expensive (about 20-fold) and faster (1-2 days instead of weeks) than synthesizing peptides. The IVTT step only adds a few additional hours, making it possible to generate peptide libraries that are tailored to any disease and/or individuals quickly and affordably.

[0232] pMHC tetramers generated by UV-exchange using either IVTT- or synthetic-produced peptides stained cognate and non-cognate T cell clones similarly (FIGS. 1C and 3). IVTT can generate 20-100 μM of the desired peptide, which is in the concentration range commonly used for UV-mediated peptide exchange (FIG. 4). Covalent attachment of the DNA-BC to PE or APC streptavidin scaffold did not hinder staining performance of the resulting DNA-BC pMHC tetramer (FIG. 5). DNA-BC pMHC tetramer achieved a detection sensitivity of as few as ˜19 tetramer complexes per cell, which is comparable to the fluorescent pMHC tetramer detection limit (FIG. 6). 6 main TetTCR-Seq experiments were performed and they are summarized in FIG. 7.

[0233] The ability of TetTCR-Seq was assessed to accurately link TCRαβ sequence with pMHC binding from primary CD8⁺ T cells in human peripheral blood. In Experiment 1, a 96-peptide library was constructed consisting of well documented foreign and endogenous peptides bound to HLA-A2 and isolated dominant pathogen-specific T cells as well as rare precursor antigen-binding T cells from a healthy CMV sero-positive donor (FIG. 1, 8). To test whether TetTCR-Seq can detect cross-reactive peptides, included in the panel was a documented HCV wildtype (WT) peptide, HCV-KLV(WT), and 4 candidate altered peptide ligands (APL) with 1-2 amino acid (AA) substitutions. A T cell clone that was established using HCV-KLV (WT) was spiked into the donor's sample to test for its potential to cross-react with the APLs.

[0234] TCRα and TCRβ sequences were successfully amplified along with the DNA-BC and the efficiencies are comparable to previous protocols (FIG. 7). Sequencing error-containing DNA-BC reads were removed before downstream analysis (FIG. 9A-C). Positively binding peptides were classified by their MID counts using two criteria: an MID threshold derived from tetramer negative controls and a ratio of MID counts between the peptides above and below this threshold (FIG. 1D). MID counts also correlated with the fluorescence staining intensity (FIG. 9D-E), confirming its utility in quantifying the number of bound pMHC tetramers.

[0235] Using this classification scheme, the expected HCV-KLV(WT) epitope were identified from all sorted cells belonging to the spike-in clone (FIG. 1E, 10A). In addition, it was discovered that all four APLs were also classified as binders. The 6^{th} ranked peptide and beyond, by MID count, all classified as non-binders; Their MID species varied from cell-to-cell, which suggests non-specific binding. A separate pMHC staining experiment on the T cell clone confirmed that the classification is accurate (FIGS. 1F and 10B-D). It was also confirmed that all primary cells with shared TCR sequences also shared the same peptide specificity (=FIG. 10E-F). These results show that TetTCR-Seq is able to resolve positively binding peptides in primary T cell populations and identify up to five cross-reactive peptides per cell.

[0236] The majority of primary T cells were classified as binding one peptide (FIG. 1G). This result is expected because the probability of TCR cross-reactivity between similar peptides is higher than disparate ones, and most of the peptides used in Experiment 1 had a Levenshtein distance of greater than 4 among each other (Table 2, 4). However, two cells were detected that were classified as binding GP100-IMD and GP100-ITD simultaneously (FIG. 1G); these two peptides are only 1 AA apart and cross-reactivity has been previously reported.

[0237] Among the peptides surveyed, a high degree of peptide diversity was found in the foreign-specific naïve T cell repertoire (FIG. 1H). This diversity reduced in the non-naïve repertoire to two dominant peptides for CMV and influenza of high frequency (FIG. 1H). This is expected given the CMV sero-positive status and a high probability of influenza exposure or vaccination for this donor. The majority of cells within the endogenous-binding population responded to MART1-A2L, which corroborates its high documented frequency relative to other endogenous epitopes (FIG. 1H). Linked TCR and DNA-BC analysis uncovered dominant recognition patterns in MART1-A2L and YFV-LLW specific TCRs by the TCRα V gene 12-2 and 12-1/12-2, respectively, with variable TCRβ V gene usage (FIG. 1I). This result is consistent with recent literature reports. In Experiment 2, TetTCR-Seq was performed on a second CMV seropositive donor and verified the findings from Experiment 1 (FIG. 11). These results highlight the ability of TetTCR-Seq to accurately link pMHC binding with TCR sequences.

[0238] TetTCR-Seq was next applied to profile cancer antigen cross-reactivity in healthy donor peripheral blood T cells and isolate neo-antigen (Neo)-specific TCRs with no cross-reactivity to wildtype counterpart antigen (WT). Naïve T cells from healthy donors are a useful source of Neo-specific TCRs. However, most neo-antigens are 1 AA from the WT sequence, meaning that Neo-specific TCRs can potentially cross-react with endogenous host cells to cause severe autoimmunity, and even death. In Experiment 3, 20 pairs of Neo-WT peptides were surveyed that bind with high affinity to HLA-A2. pMHC tetramer-based selection of naïve T cells has an inherent risk of selecting T cells reactive to peptides that are not naturally processed. As such, peptides were also chosen based on previous evidence of tumor expression and T cell targeting. Neo and WT pMHC pools were labeled using two separate fluorophores, allowing for sorting of three cell populations, Neo⁺WT⁻, Neo⁻WT⁺, and Neo⁺WT⁺ (FIGS. 2A and 12).

[0239] Tetramer⁺ CD8⁺ T cells were enriched in the naive phenotype compared to bulk, indicative of no prior exposure to the surveyed antigens (FIG. 12D). No more than one peptide was detected in T cells sorted from either the Neo⁺WT⁻ or the Neo⁻WT⁺ populations (FIG. 13A-C). T cells with two detected peptide binders accounted for 84% of the Neo⁺WT⁺ population, 98% of which belonged to a Neo-WT antigen pair (FIG. 13D).

[0240] Just as in Experiment 1, the criteria correctly classified all peptides for the spike-in HCV-binding clone (FIG. 14). Interestingly, despite only sorting on the CCR7⁺CD45RA⁺ naïve phenotype, 6 clusters of primary T cells were detected with shared TCR sequences on the AA level (Clusters 1-6 in FIG. 14A). Cells with shared TCR α and β sequences bound the same peptide (Clusters 1a, 2, 5, 6). Many of these TCRs were found to be encoded by different TCRα and TCRβ nucleotide sequences, indicating convergent VDJ recombination. It was also found that in some TCRs, the same TCR α chain is sufficient for them to engage the same pMHC, while TCRβ chains are all different (Clusters 3 and 4). However, in other TCRs, the same TCR α paired with a different TCR β chain can lead to different peptide specificity (Compare Cluster 1c to 1a). These results highlight the advantage of high-throughput linking of TCR sequence with its antigenic peptide as a first step in deciphering the TCR repertoire, which could be complementary to bioinformatics analysis.

[0241] Cells in the Neo⁺WT⁺ population bound 11 of the 20 Neo-WT antigen pairs, indicating that Neo-WT cross-reactivity is wide-spread in the precursor T cell repertoire (FIGS. 2B and 13E). By analyzing the proportion of mono and cross-reactive T cells from each Neo-WT pair, it was observed that neo-antigens with mutations at fringe positions 3, 8, and 9 elicited significantly more cross-reactive responses than the ones at center positions 4, 5, and 6 (FIG. 2C). This is consistent with observations made by others using alanine substitutions on peptides in a mouse model. In Experiment 4, TetTCR-Seq was performed on a separate donor and observed the same trend (FIG. 15). The percentage of cross-reactive T cells for the same Neo-WT antigen pair was not significantly different between Experiment 3 and 4, indicating that this property is conserved between donors for the peptides tested (FIG. 15H).

[0242] Five peptides in Experiment 3 and 4 had no detected T cell binding. Further analysis showed no difference in the pMHC UV-exchange efficiency associated with detected and undetected peptides (FIG. 16). TetTCR-Seq on a subsequent donor using these 5 peptides showed that these antigen-binding T cells are present at low frequencies in blood. Furthermore, monoclonal T cell lines specific for 3 of the peptides were successfully generated and found that IVTT-generated pMHC tetramers stained similarly as their synthetic peptide counterparts. These results confirm that “undetected” peptide-binding T cells in Experiment 3 and 4 were more likely caused by low cell frequency rather than inefficient pMHC generation by IVTT.

[0243] To test the feasibility of TetTCR-Seq to screen larger libraries, a 315 Neo-WT antigen pair library (1 WT is associated with 2 Neo) was assembled and T cell cross-reactivity was profiled across more than 1000 Tetramer⁺ CD8⁺ sorted single T cells from two donors, corresponding to Experiment 5 and 6 (FIGS. 2D and 17-18). Neo-antigens were selected with high predicted affinity for HLA-A2 from recent literature, and preference was given to those with positive binding and/or T cell assays. ELISA on all 315 pMHC species showed no difference in pMHC UV-exchange efficiency between detected and undetected peptides (FIG. 19).

[0244] Similar to Experiment 3 and 4, neo-antigen mutations in the fringes had an elevated percentage of cross-reactive T cells than mutations in the middle (FIG. 2E-F). This difference increased when middle was extended to position 3-7 (FIG. 18J). This larger dataset also enabled us to examine the effect of neo-antigen mutation identity. The PAM1 matrix was used as a measure for chemical similarity between AAs. High PAM1 values correspond to a high mutational probability in evolution. It was found that neo-antigen mutations with high PAM1 values have a significantly higher percentage of cross-reactive T cells than those with low PAM1 values (FIG. 2F, 18K). Thus, in addition to mutation position, WT-binding T cells are more likely to recognize the neo-antigen if the mutated AA is chemically similar to the original. While these results show that mutation position and identity are two major factors that contribute to T cell cross-reactivity, large unaccounted variations still exist between peptides, highlighting the necessity for experimental screening against WT cross-reactivity when using neo-antigen based therapy in cancer.

[0245] Lastly, it was assessed the utility of TetTCR-Seq for isolating neo-antigen-specific TCRs with no cross-reactivity to WT. To this end, cell lines were generated from the Neo⁺WT⁻, Neo⁻WT⁺, and Neo⁺WT⁺ populations using the 40 Neo-WT pMHC tetramer library from Experiment 3 and 4. Each T cell line consist of 5 Tetramer⁺ cells sorted from the same population. These cell lines responded to Neo and WT antigens in a manner that matched their population gating scheme during sorting (FIG. 2G). The choice of fluorophore did not affect this functional profile, as tested by swapping the fluorophore encoding of the DNA-BC pMHC library (FIG. 20). The T cell lines were further characterized in Neo⁺WT⁻ and Neo⁺WT⁺ categories by TetTCR-Seq and found unique TCRs in each cell line targeting a wide range of antigens (FIG. 21A-B). Neo⁺WT⁺ cell lines identified as monoclonal were functional against the Neo-WT antigen pair identified by TetTCR-Seq, but not the other 19 Neo-WT pairs (FIG. 21C).

[0246] To directly show that TCR sequences isolated from primary T cells match the antigen specificity detected by the TetTCR-Seq, five TCRs were transduced from Experiment 3 and 4 into the TCR-deficient Jurkat 76 cell line. TCR-transduced Jurkat cells were stained with pMHC tetramers that corresponded to the neoantigen-WT paired specificity of the primary T cell (FIG. 2H, 22). Together, the TCR-transduced Jurkat and T cell line experiments show that TetTCR-Seq is not only capable of identifying cross-reactive TCRs on a large scale but can also identify mono-specific TCRs that are functionally reactive to Neo- but not WT-peptide in a high-throughput manner. Such TCRs could be therapeutically valuable in TCR re-directed adoptive cell transfer therapy.

[0247] In conclusion, it was shown that TetTCR-Seq can accurately link TCR sequences with multiple antigenic pMHC binders. This platform is general and can be broadly applied to interrogate antigen-binding T cells in clonally expanded or precursor T cell populations, from infection to autoimmune disease to cancer immunotherapy. With promising methods emerging for predicting antigenic pMHCs for groups of TCR sequences, TetTCR-Seq can not only expedite the discovery in this area but also help to experimentally validate informatically predicted antigens. The unique DNA-BC/IVTT approach enables the affordable and rapid generation of a large set of DNA-BC pMHC tetramers, making it possible to widely adopt TetTCR-Seq to accelerate T cell based scientific and clinical discoveries. Lastly, the pairing of TetTCR-Seq with recent advances in single-cell transcriptome and protein quantification signals a future in which integrated single T cell phenotype, TCR sequence, and pMHC-binding landscape can be measured at scale.

TABLE 2
Summary of the 6 main TetTCR-Seq experiments performed and blood donor characteristics. The
percentage difference between “DNA-BC” column and “Antigen Detection” column are those T cells without identified binding antigen
based on the criteria listed. These T cells correspond to grey lines in all the peptide rank curves.

| | | | | CMV | pMHC | Sorted | Cells |
|---|---|---|---|---|---|---|---|
| Expt | Expt Type | Age | Gender | Status | Library^{a} | Population | Sorted |
| 1 | 96 Foreign | 30 | Male | + | 29 Foreign (APC) | Foreign Naïve | 56 |
| | Endogenous | | | | 61 Endogenous (PE) | Foreign Non- | 32 |
| | | | | | 5 HCV-KLV + | Naïve | |
| | | | | | Mut. (APC) | Endogenous | 56 |
| | | | | | 1 Neg. Ctrl | Naïve | |
| | | | | | (PE, APC)^{e} | Endogenous | 23 |
| | | | | | | Non-Naïve | |
| | | | | | | HCV-KLV | 8 |
| | | | | | | Specific Clone | |
| | | | | | | Tetramer⁻ | 8 |
| 2 | 96 Foreign | 51 | Male | + | 29 Foreign (APC) | Foreign Naïve | 96 |
| | Endogenous | | | | 61 Endogenous (PE) | Foreign Non- | 88 |
| | | | | | 6 HCV-KLV + | Naïve | |
| | | | | | Mut. (APC)^{f} | Endogenous | 96 |
| | | | | | | Naïve | |
| | | | | | | Endogenous | 88 |
| | | | | | | Non-Naïve | |
| | | | | | | HCV-KLV | 8 |
| | | | | | | Specific Clone | |
| | | | | | | Tetramer⁻ | 8 |
| 3^{g} | 40 | 56 | Male | − | 20 Neoantigen (APC) | Neo⁺WT⁻ | 142 |
| | Neoantigen | 65 | Male | − | 20 Wildtype (PE) | Neo⁻WT⁺ | 43 |
| | Wildtype | | | | 1 HCV-KLV (PE, APC) | Neo⁺WT⁺ | 76 |
| | | | | | 1 Neg. Ctrl (PE, APC)^{e} | HCV-KLV | 12 |
| | | | | | | Specific Clone | |
| | | | | | | Tetramer⁻ | 12 |
| 4^{g} | 40 | 50 | Male | − | 20 Neoantigen (APC) | Neo⁺WT⁻ | 144 |
| | Neoantigen | 56 | Female | − | 20 Wildtype (PE) | Neo⁻WT⁺ | 44 |
| | Wildtype | | | | 4 MAGE-A (PE, APC)^{h} | Neo⁺WT⁺ | 108 |
| | | | | | | Tetramer⁻ | 35 |
| 5 | 315 | 47 | Female | − | 158 Neoantigen (PE)ⁱ | Neo⁺WT⁻ | 221 |
| | Neoantigen | | | | 157 Wildtype (APC) | Neo⁻WT⁺ | 312 |
| | Wildtype | | | | 1 HCV-KLV (PE, APC) | Neo⁺WT⁺ | 255 |
| | | | | | 1 Neg. Ctrl (PE, APC)^{e} | HCV-KLV | 8 |
| | | | | | | Specific Clone | |
| | | | | | | Tetramer⁻ | 8 |
| 6 | 315 | 58 | Male | − | 158 Neoantigen (PE)ⁱ | Neo⁺WT⁻ | 118 |
| | Neoantigen | | | | 157 Wildtype (APC) | Neo⁻WT⁺ | 68 |
| | Wildtype | | | | 1 HCV-KLV (PE, APC) | Neo⁺WT⁺ | 82 |
| | | | | | 1 Neg. Ctrl (PE, APC)^{e} | Tetramer⁻ | 6 |

Summary of the 6 main TetTCR-Seq experiments performed and blood donor characteristics. The
percentage difference between “DNA-BC” column and “Antigen Detection” column are those T cells without identified binding antigen
based on the criteria listed. These T cells correspond to grey lines in all the peptide rank curves.

| | Amplification Efficiency | | | | Antigen | Relevant |
|---|---|---|---|---|---|---|
| Expt | TCRα^{b} | TCRβ^{b} | TCRαβ^{b} | DNA-BC^{c} | Detection^{d} | Figures |
| 1 | 28 (50%) | 36 (64%) | 20 (36%) | 56 (100%) | 50 (89%) | Main Figure: |
| | 13 (41%) | 19 (59%) | 10 (31%) | 32 (100%) | 32 (100%) | 1b, 1d, 1e, 1g, 1h, 1i |
| | 37 (66%) | 45 (80%) | 34 (61%) | 56 (100%) | 55 (98%) | Supplementary: |
| | 9 (39%) | 12 (52%) | 4 (17%) | 23 (100%) | 23 (100%) | 6, 7, 8 |
| | 8 (100%) | 8 (100%) | 8 (100%) | 8 (100%) | 8 (100%) | |
| | n/a | n/a | n/a | 5 (63%) | 0 (0%) | |
| 2 | 74 (77%) | 78 (81%) | 59 (61%) | 96 (100%) | 85 (79%) | Supplementary: |
| | 67 (76%) | 62 (70%) | 54 (61%) | 88 (100%) | 84 (95%) | 6, 9 |
| | 75 (78%) | 81 (84%) | 64 (67%) | 96 (100%) | 92 (96%) | |
| | 79 (90%) | 83 (94%) | 77 (88%) | 87 (99%) | 75 (85%) | |
| | 7 (88%) | 7 (88%) | 7 (88%) | 8 (100%) | 7 (88%) | |
| | n/a | n/a | n/a | 7 (88%) | 0 (0%) | |
| 3^{g} | 112 (79%) | 130 (92%) | 106 (75%) | 142 (100%) | 127 (89%) | Main Figure: |
| | 36 (84%) | 34 (79%) | 30 (70%) | 43 (100%) | 43 (100%) | 2a-c |
| | 61 (80%) | 71 (93%) | 59 (78%) | 76 (100%) | 71 (93%) | Supplementary: |
| | 12 (100%) | 12 (100%) | 12 (100%) | 12 (100%) | 12 (100%) | 10-12, 14 |
| | n/a | n/a | n/a | 10 (83%) | 0 (0%) | |
| 4^{g} | 34 (24%) | 33 (23%) | 12 (8%) | 144 (100%) | 144 (100%) | Supplementary: |
| | 16 (36%) | 11 (25%) | 6 (14%) | 44 (100%) | 44 (100%) | 10, 13, 14 |
| | 30 (28%) | 31 (29%) | 11 (10%) | 108 (100%) | 95 (88%) | |
| | n/a | n/a | n/a | 13 (37%) | 0 (0%) | |
| 5 | 136 (62%) | 137 (62%) | 112 (51%) | 215 (97%) | 197 (89%) | Main Figure: |
| | 172 (55%) | 183 (59%) | 134 (43%) | 301 (96%) | 186 (60%) | 2d-f |
| | 140 (55%) | 150 (59%) | 108 (42%) | 249 (98%) | 189 (74%) | Supplementary: |
| | 6 (75%) | 6 (75%) | 6 (75%) | 7 (88%) | 7 (88%) | 15-17 |
| | n/a | n/a | n/a | 7 (88%) | 0 (0%) | |
| 6 | 97 (82%) | 99 (84%) | 86 (73%) | 118 (100%) | 118 (100%) | |
| | 53 (78%) | 58 (85%) | 46 (68%) | 68 (100%) | 66 (97%) | |
| | 62 (76%) | 67 (82%) | 52 (63%) | 82 (100%) | 72 (88%) | |
| | n/a | n/a | n/a | 1 (17%) | 0 (0%) | |

^{a}Detailed summary in Supplementary Table. Shown is the number of peptides, peptide category, and fluorescent encoding.
^{b}Includes only cells containing productive TCRα and/or TCRβ sequences are included
^{c}Includes only cells with at least 100 reads of DNA-BC and this applies to Tetramer⁻ cells as well.
^{d}Includes only cells with at least one detected antigen from the MID threshold criteria
^{e}A DNA-BC pMHC tetramer UV-exchanged with a non HLA-A2 binding peptide, RLFAFVRFT
^{f}The library is the same as Expt 1, except for the replacement of the negative control peptide with an additional HCV-KLV mutant peptide, HCV-A9N. This peptide did not bind to the HCV-KLV Specific clone in a separate tetramer staining, and serves as a negative control.
^{g}Blood samples from two donors were pooled together in Experiment 3 and 4
^{h}The library is the same as Expt 3, except for the replacement of the negative control and HCV-KLV peptide with 4 peptides from the MAGE-A antigen family. 3 MAGE-A specific T cells were detected out of 298 cells and were not used for subsequent analysis.
ⁱNeo-antigen/WT pairs are used for all antigens except for DHX33-LLA, which have two neo-antigens with substitutions K5T and M4I. One T cell was found to be cross-reactive to all three peptides.

TABLE 3
TetTCR-Seq summary for experiment 1

| Cell | Sorted | Detected Peptide by MID Count | | | | | TCRα,1 | | TCRα,2 | | TCRβ | | SEQ ID NOs |
|---|---|---|---|---|---|---|---|---|---|---|---|---|---|
| Name | Population | Rank 1 | Rank 2 | Rank 3 | Rank 4 | Rank 5 | TRAV | CDR3α | TRAV | CDR3a | TRBV | CDR3β | (L to R) |
| AA1 | Naïve | ZNT8- | 0 | 0 | 0 | 0 | | | | | 6-2*01,6- | CASSYSENEQFF | 1628 |
| | Endogenous | LLS | | | | | | | | | 3*01 | | |
| AA10 | Naïve | MART1- | 0 | 0 | 0 | 0 | 12-2*01 | CGGQAGTALIF | | | 6-1*01 | CASRSYVASSNE | 1549 |
| | Endogenous | A2L | | | | | | | | | | QFF | 1629 |
| AA11 | Naïve | MART1- | 0 | 0 | 0 | 0 | 12-2*01 | CAVNGGNQFY | | | 28*01 | CASTQWYGGGT | 1550 |
| | Endogenous | A2L | | | | | | F | | | | PPYF | 1630 |
| AA12 | Naïve | MART1- | 0 | 0 | 0 | 0 | 12-2*01 | CAVGRDDKIIF | | | 7-2*01 | CASSLTTGVFSQ | 1551 |
| | Endogenous | A2L | | | | | | | | | | PQHF | 1631 |
| AA2 | Naïve | MART1- | 0 | 0 | 0 | 0 | 17*01 | CATCMDSNYQL | | | 15*01 | CATSPYSVTTFA | 1552 |
| | Endogenous | A2L | | | | | | IW | | | | NTIYF | 1632 |
| AA3 | Naïve | MAGEA10- | 0 | 0 | 0 | 0 | | | | | 2*01 | CAGMTVTEAFF | 1633 |
| | Endogenous | GLY | | | | | | | | | | | |
| AA4 | Naïve | MART1- | 0 | 0 | 0 | 0 | | | | | 4-2*01 | CASSQALLAPSTD | 1634 |
| | Endogenous | A2L | | | | | | | | | | TQYF | |
| AA5 | Naïve | MART1- | 0 | 0 | 0 | 0 | 12-2*01 | CAVTTDSWGKL | | | 2*01 | CASSEGGIGELF | 1553 |
| | Endogenous | A2L | | | | | | QF | | | | F | 1635 |
| AA6 | Naïve | MART1- | 0 | 0 | 0 | 0 | | | | | | | |
| | Endogenous | A2L | | | | | | | | | | | |
| AA7 | Naïve | MART1- | 0 | 0 | 0 | 0 | | | | | 4-1*01 | CASSQDTDGRM | 1636 |
| | Endogenous | A2L | | | | | | | | | | FF | |
| AA8 | Naïve | MART1- | 0 | 0 | 0 | 0 | 12-2*01 | CAVNPGGADG | | | 6-1*01 | CASSEAPGTSV | 1554 |
| | Endogenous | A2L | | | | | | LTF | | | | GGLFF | 1637 |
| AA9 | Naïve | MART1- | 0 | 0 | 0 | 0 | 12-2*01 | CAVSGSARQLT | | | 28*01 | CASTTGDGLGAF | 1555 |
| | Endogenous | A2L | | | | | | F | | | | F | 1638 |
| AB1 | Naïve | PPI-RLL | 0 | 0 | 0 | 0 | 8-1*01 | CAVNPRDNYG | | | 4-2*01 | CASSQDIGNFEQ | 1556 |
| | Endogenous | | | | | | | QNFVF | | | | FF | 1639 |
| AB11 | Naïve | MART1- | 0 | 0 | 0 | 0 | | | | | | | |
| | Endogenous | A2L | | | | | | | | | | | |
| AB12 | Naïve | ZNT8- | 0 | 0 | 0 | 0 | 12-3*01 | CAAGGSYIPTF | | | 28*01 | CASSGTGGYSG | 1557 |
| | Endogenous | LLS | | | | | | | | | | ANVLTF | 1640 |
| AB3 | Naïve | MART1- | 0 | 0 | 0 | 0 | | | | | | | |
| | Endogenous | A2L | | | | | | | | | | | |
| AB4 | Naïve | MART1- | 0 | 0 | 0 | 0 | 12-2*01 | CAVNTGFQKLV | | | 27*01 | CASSEANEKLFF | 1558 |
| | Endogenous | A2L | | | | | | F | | | | | 1641 |
| AB5 | Naïve | MART1- | 0 | 0 | 0 | 0 | 12-2*01 | CAVNGNNRLAF | | | 4-1*01 | CASSQAPLASG | 1559 |
| | Endogenous | A2L | | | | | | | | | | GYTF | 1642 |
| AB6 | Naïve | MART1- | 0 | 0 | 0 | 0 | 12-2*01 | CAVQGGGSQG | | | 7-2*01 | CASSLAGQVFS | 1560 |
| | Endogenous | A2L | | | | | | NLIF | | | | GELFF | 1643 |
| AB7 | Naïve | MART1- | 0 | 0 | 0 | 0 | 12-2*01 | CAAGGSQGNLI | | | 4-2*01 | CASSQGTINTGE | 1561 |
| | Endogenous | A2L | | | | | | F | | | | LFF | 1644 |
| AB8 | Naïve | MART1- | 0 | 0 | 0 | 0 | 12-2*01 | CAVNIPTF | | | 20-1*01 | CSARDGTSSGY | 1562 |
| | Endogenous | A2L | | | | | | | | | | F | 1645 |
| AB9 | Naïve | MART1- | 0 | 0 | 0 | 0 | | | | | 19*01 | CASMPRGFPSD | 1646 |
| | Endogenous | A2L | | | | | | | | | | EQFF | |
| AC1 | Naïve | MART1- | 0 | 0 | 0 | 0 | | | | | 4-2*01 | CASSQDWVAEQ | 1647 |
| | Endogenous | A2L | | | | | | | | | | YF | |
| AC10 | Naïve | MART1- | 0 | 0 | 0 | 0 | 12-2*01 | CAVSGTASKLT | | | 6-6*01 | CASSYGTGDGY | 1563 |
| | Endogenous | A2L | | | | | | F | | | | TF | 1648 |
| AC11 | Naïve | GP100- | 0 | 0 | 0 | 0 | 13-2*01 | CAEKGGGGAD | | | | | 1564 |
| | Endogenous | IMD | | | | | | GLTF | | | | | |
| AC12 | Naïve | MART1- | 0 | 0 | 0 | 0 | 23/DV6* | CAASKEAAGNK | 12-2*01 | CAVKDGQNF | 28*01 | CASSLGLGQPQ | 1565162 |
| | Endogenous | A2L | | | | | 01 | LTF | | VF | | GF | 51649 |
| AC2 | Naïve | GP100- | GP100- | 0 | 0 | 0 | 26-1*01 | CIVRGFAYGQN | 16*01 | CALSPGYNF | 18*01 | CASSSRDRSSST | 1566162 |
| | Endogenous | IMD | ITD | | | | | FVF | | NKFYF | | EAFF | 61650 |
| AC3 | Naïve | MART1- | 0 | 0 | 0 | 0 | | | | | | | |
| | Endogenous | A2L | | | | | | | | | | | |
| AC4 | Naïve | MART1- | 0 | 0 | 0 | 0 | 12-2*01 | CAVSDGQKLLF | | | 14*01 | CASSQAGVGGE | 1567 |
| | Endogenous | A2L | | | | | | | | | | LFF | 1651 |
| AC5 | Naïve | MART1- | 0 | 0 | 0 | 0 | | | | | 28*01 | CASSLPGLASHE | 1652 |
| | Endogenous | A2L | | | | | | | | | | QFF | |
| AC6 | Naïve | MART1- | 0 | 0 | 0 | 0 | 12-2*01 | CAVTRGGADGL | | | 6-5*01 | CASSYSGLGQP | 1568 |
| | Endogenous | A2L | | | | | | TF | | | | QHF | 1653 |
| AC7 | Naïve | MART1- | 0 | 0 | 0 | 0 | 13-2*01 | CAENRDGDDKII | | | | | 1569 |
| | Endogenous | A2L | | | | | | F | | | | | |
| AC8 | Naïve | MART1- | 0 | 0 | 0 | 0 | 12-2*01 | CAASGGGADG | | | 28*01 | CASSSTVYNEQF | 1570 |
| | Endogenous | A2L | | | | | | LTF | | | | G | 1654 |
| AC9 | Naïve | MART1- | 0 | 0 | 0 | 0 | 12-2*01 | CAVRTQIIF | | | 27*01 | CASSRSPGGVY | 1571 |
| | Endogenous | A2L | | | | | | | | | | EQYF | 1655 |
| AD1 | Naïve | MART1- | 0 | 0 | 0 | 0 | | | | | | | |
| | Endogenous | A2L | | | | | | | | | | | |
| AD10 | Naïve | MART1- | 0 | 0 | 0 | 0 | 41*01 | CAVRSERSGG | | | 27*01 | CASSPSPAGAYE | 1572 |
| | Endogenous | A2L | | | | | | GADGLTF | | | | QYF | 1656 |
| AD11 | Naïve | CD1-LLG | 0 | 0 | 0 | 0 | 12-2*01 | CAVNDYKLSF | | | 27*01 | CASSWTGANYG | 1573 |
| | Endogenous | | | | | | | | | | | YTF | 1657 |
| AD12 | Naïve | MART1- | 0 | 0 | 0 | 0 | 12-2*01 | CAVNTGFQKLV | | | 27*01 | CASSPNLAGEE | 1558 |
| | Endogenous | A2L | | | | | | F | | | | QYF | 1658 |
| AD2 | Naïve | MART1- | 0 | 0 | 0 | 0 | | | | | | | |
| | Endogenous | A2L | | | | | | | | | | | |
| AD3 | Naïve | MART1- | 0 | 0 | 0 | 0 | 12-2*01 | CAAEFYF | | | 11-1*01 | CASSLGQGQPQ | 1574 |
| | Endogenous | A2L | | | | | | | | | | HF | 1659 |
| AD4 | Naïve | MART1- | 0 | 0 | 0 | 0 | 12-2*01 | CASDNNARLMF | | | 4-1*01 | CASSQEVVANN | 1575 |
| | Endogenous | A2L | | | | | | | | | | EQFF | 1660 |
| AD5 | Naïve | MART1- | 0 | 0 | 0 | 0 | | | | | 27*01 | CASSLGGNTGEL | 1661 |
| | Endogenous | A2L | | | | | | | | | | FF | |
| AD6 | Naïve | MART1- | 0 | 0 | 0 | 0 | 12-2*01 | CAVIRSGGYNK | | | 5-6*01 | CASSLELAGGPA | 1576 |
| | Endogenous | A2L | | | | | | LIF | | | | FF | 1662 |
| AD7 | Naïve | MART1- | 0 | 0 | 0 | 0 | | | | | | | |
| | Endogenous | A2L | | | | | | | | | | | |
| AD8 | Naïve | MART1- | 0 | 0 | 0 | 0 | | | | | 2*01 | CASRAGIQSGEL | 1663 |
| | Endogenous | A2L | | | | | | | | | | FF | |
| AD9 | Naïve | MART1- | 0 | 0 | 0 | 0 | | | | | 27*01 | CASSPSGHYEQ | 1664 |
| | Endogenous | A2L | | | | | | | | | | YF | |
| AE1 | Naïve Foreign | CMV- | 0 | 0 | 0 | 0 | 12-2*01 | CAGFSGGYNKL | | | 9*01 | CASSRGTGGYE | 1577 |
| | | MLN | | | | | | IF | | | | QFF | 1665 |
| AE10 | Naïve Foreign | HTLV- | 0 | 0 | 0 | 0 | 12-3*01 | CTSRVSDGQKL | | | | | 1578 |
| | | LLF | | | | | | LF | | | | | |
| AE11 | Naïve Foreign | YFV-LLW | 0 | 0 | 0 | 0 | | | | | 12- | CASSLSGDEQYF | 1666 |
| | | | | | | | | | | | 3*01,12- | | |
| | | | | | | | | | | | 4*01 | | |
| AE12 | Naïve Foreign | YFV-LLW | 0 | 0 | 0 | 0 | 12-1*01 | CVVNNDKIIF | | | 27*01 | CASSLTPSASGY | 1579 |
| | | | | | | | | | | | | EQYF | 1667 |
| AE2 | Naïve Foreign | HSV-SLP | 0 | 0 | 0 | 0 | | | | | | | |
| AE3 | Naïve Foreign | HSV-SLP | 0 | 0 | 0 | 0 | | | | | | | |
| AE4 | Naïve Foreign | HSV-SLP | 0 | 0 | 0 | 0 | | | | | | | |
| AE5 | Naïve Foreign | YFV-LLW | 0 | 0 | 0 | 0 | | | | | | | |
| AE6 | Naïve Foreign | IVPA- | 0 | 0 | 0 | 0 | | | | | | | |
| | | FMY | | | | | | | | | | | |
| AE7 | Naïve Foreign | ALADH- | 0 | 0 | 0 | 0 | 12-1*01 | CVVNEYSSASK | | | 14*01 | CASSQGWDEQY | 1580 |
| | | VLM | | | | | | IF | | | | F | 1668 |
| AE8 | Naïve Foreign | ALADH- | 0 | 0 | 0 | 0 | | | | | 9*01 | CASSTLSGNYNE | 1669 |
| | | VLM | | | | | | | | | | QFF | |
| AE9 | Naïve Foreign | HCV-L21 | 0 | 0 | 0 | 0 | | | | | 28*01 | CASGSVPEQYF | 1670 |
| AF1 | Naïve Foreign | YFV-LLW | 0 | 0 | 0 | 0 | 12-1*01 | CVVAEARLMF | | | 27*01 | CASSPGTGGTY | 1581 |
| | | | | | | | | | | | | EQYF | 1671 |
| AF10 | Naïve Foreign | EBV-YLQ | 0 | 0 | 0 | 0 | | | | | 27*01 | CASSGLAGFSP | 1672 |
| | | | | | | | | | | | | QETQYF | |
| AF11 | Naïve Foreign | YFV-LLW | 0 | 0 | 0 | 0 | | | | | 9*01 | CASSGGTGAYE | 1673 |
| | | | | | | | | | | | | QYF | |
| AF12 | Naïve Foreign | HBV- | 0 | 0 | 0 | 0 | 12-2*01 | CAVNGANDYKL | | | | | 1582 |
| | | WLS | | | | | | SF | | | | | |
| AF2 | Naïve Foreign | HCV-LLF | 0 | 0 | 0 | 0 | | | | | 28*01 | CASSAGASIEQY | 1674 |
| | | | | | | | | | | | | F | |
| AF3 | Naïve Foreign | EBV-YLQ | 0 | 0 | 0 | 0 | | | | | | | |
| AF4 | Naïve Foreign | HBV- | 0 | 0 | 0 | 0 | | | | | 3-1*01 | CASSLGQGGVG | 1675 |
| | | WLS | | | | | | | | | | EKLFF | |
| AF5 | Naïve Foreign | HTLV- | 0 | 0 | 0 | 0 | 38- | CAYSMLDRLMF | | | 15*01 | CATRKSYNSPLH | 1583 |
| | | LLF | | | | | 2/DV8* | | | | | F | 1676 |
| | | | | | | | 01 | | | | | | |
| AF6 | Naïve Foreign | IVPA- | 0 | 0 | 0 | 0 | | | | | | | |
| | | FMY | | | | | | | | | | | |
| AF7 | Naïve Foreign | HTLV- | 0 | 0 | 0 | 0 | | | | | | | |
| | | LLF | | | | | | | | | | | |
| AF8 | Naïve Foreign | YFV-LLW | 0 | 0 | 0 | 0 | 8-3*01 | CAVGSDSSYKL | | | 4-1*01 | CASSQAQGTYE | 1584 |
| | | | | | | | | IF | | | | QYF | 1677 |
| AF9 | Naïve Foreign | HTLV- | 0 | 0 | 0 | 0 | | | | | | | |
| | | LLF | | | | | | | | | | | |
| AG1 | Naïve Foreign | CMV- | 0 | 0 | 0 | 0 | | | | | 27*01 | CASSLGWGYEQ | 1678 |
| | | MLN | | | | | | | | | | YF | |
| AG10 | Naïve Foreign | CMV- | 0 | 0 | 0 | 0 | 12-2*01 | CAVGIYNQGGK | | | 4-1*01 | CASSPGLDYEQ | 1585 |
| | | MLN | | | | | | LIF | | | | YF | 1679 |
| AG11 | Naïve Foreign | IV-GIL | GLNS- | 0 | 0 | 0 | | | | | | | |
| | | | GLL | | | | | | | | | | |
| AG12 | Naïve Foreign | YFV-LLW | 0 | 0 | 0 | 0 | | | | | 12- | CASTRQFNQPQ | 1680 |
| | | | | | | | | | | | 3*01,12- | HF | |
| | | | | | | | | | | | 4*01 | | |
| AG2 | Naïve Foreign | YFV-LLW | 0 | 0 | 0 | 0 | 8-1*01 | CAVRRDDKIIF | | | | | 1586 |
| AG3 | Naïve Foreign | YFV-LLW | 0 | 0 | 0 | 0 | 12-2*01 | CAVNEGTGNQ | | | 4-1*01 | CASSQGGGTEA | 1587 |
| | | | | | | | | FYF | | | | FF | 1681 |
| AG4 | Naïve Foreign | HPV-YML | 0 | 0 | 0 | 0 | | | | | | | |
| AG5 | Naïve Foreign | EBV-YVL | 0 | 0 | 0 | 0 | 12-2*01 | CAVKGGGADG | | | 29-1*01 | CSALTGSSYEQY | 1588 |
| | | | | | | | | LTF | | | | F | 1682 |
| AG7 | Naïve Foreign | YFV-LLW | 0 | 0 | 0 | 0 | 12-2*01 | CAEGGGADGL | | | 9*01 | CASSGGYEQYF | 1589 |
| | | | | | | | | TF | | | | | 1683 |
| AG8 | Naïve Foreign | YFV-LLW | 0 | 0 | 0 | 0 | 12-1*01 | CVVNMGKNGQ | | | 27*01 | CASSFGDSYEQ | 1590 |
| | | | | | | | | KLLF | | | | YF | 1684 |
| AG9 | Naïve Foreign | HTLV- | 0 | 0 | 0 | 0 | 29/DVS* | CAALISNFGNE | | | | | 1591 |
| | | LLF | | | | | 01 | KLTF | | | | | |
| AH1 | Naïve Foreign | IV-GIL | 0 | 0 | 0 | 0 | 27*01 | CAGGGSQGNLI | | | | | 1592 |
| | | | | | | | | F | | | | | |
| AH10 | Naïve Foreign | YFV-LLW | 0 | 0 | 0 | 0 | | | | | 9*01 | CASSLSGSSYEQ | 1685 |
| | | | | | | | | | | | | YF | |
| AH11 | Naïve Foreign | YFV-LLW | 0 | 0 | 0 | 0 | 38- | CASLGQGAQKL | | | 10-3*01 | CAISEASGVTYE | 1593 |
| | | | | | | | 2/DV8* | VF | | | | QYF | 1686 |
| | | | | | | | 01 | | | | | | |
| AH12 | Naïve Foreign | CMV- | 0 | 0 | 0 | 0 | | | | | 4-3*01 | CASSQGQGYEQ | 1687 |
| | | MLN | | | | | | | | | | YF | |
| AH2 | Naïve Foreign | CMV- | 0 | 0 | 0 | 0 | | | | | 25-1*01 | CASSGSRVPYE | 1688 |
| | | MLN | | | | | | | | | | QYF | |
| AH3 | Naïve Foreign | 0 | 0 | 0 | 0 | 0 | 12-2*01 | CAVNQAGTALI | | | 4-1*01 | CASSQTGTGAY | 1594 |
| | | | | | | | | F | | | | EQYF | 1689 |
| AH4 | Naïve Foreign | 0 | 0 | 0 | 0 | 0 | 5*01 | CAEYSSASKIIF | | | 20-1*01 | CSANRQGSIYF | 1595 |
| | | | | | | | | | | | | | 1690 |
| AH5 | Naïve Foreign | GLNS- | 0 | 0 | 0 | 0 | 12-2*01 | CAVNRDSGTYK | | | 27*01 | CASSFEWSYEQ | 1596 |
| | | GLL | | | | | | YIF | | | | YF | 1691 |
| AH6 | Naïve Foreign | HTLV- | 0 | 0 | 0 | 0 | 24*01 | CASISLDSNYQL | | | | | 1597 |
| | | LLF | | | | | | IW | | | | | |
| AH7 | Naïve Foreign | YFV-LLW | 0 | 0 | 0 | 0 | | | | | 12- | CASSHRGYEQY | 1692 |
| | | | | | | | | | | | 3*01,12- | F | |
| | | | | | | | | | | | 4*01 | | |
| AH8 | Naïve Foreign | CMV- | 0 | 0 | 0 | 0 | | | | | 28*01 | CASSPIDRAGGP | 1693 |
| | | MLN | | | | | | | | | | YEQYF | |
| AH9 | Naïve Foreign | HTLV- | 0 | 0 | 0 | 0 | | | | | | | |
| | | LLF | | | | | | | | | | | |
| BA1 | Naïve | MART1- | 0 | 0 | 0 | 0 | 12-2*01 | CAVGREAAGN | | | 6-4*01 | CASSLTSGSFAG | 1593 |
| | Endogenous | A2L | | | | | | KLTF | | | | ELFF | 1694 |
| BA10 | Naïve | MART1- | 0 | 0 | 0 | 0 | 16*01 | CALSRPSRGSQ | | | 28*01 | CASSPQGSGGE | 1599 |
| | Endogenous | A2L | | | | | | GNLIF | | | | AFF | 1695 |
| BA12 | Naïve Foreign | YFV-LLW | 0 | 0 | 0 | 0 | 26-1*01 | CIVAAISGSARQ | | | 6-2*01,6- | CASSYGGGYEQ | 1600 |
| | | | | | | | | LTF | | | 3*01 | YF | 1696 |
| BA2 | Naïve | MART1- | 0 | 0 | 0 | 0 | 12-2*01 | CAVSGGGADG | | | 28*01 | CASSALGINEQF | 1601 |
| | Endogenous | A2L | | | | | | LTF | | | | F | 1697 |
| BA3 | Naïve | MART1- | 0 | 0 | 0 | 0 | 12-2*01 | CAVNVQGGSE | | | 28*01 | CASSWTGGGQP | 1602 |
| | Endogenous | A2L | | | | | | KLVF | | | | QHF | 1698 |
| BA4 | Naïve | IGRP- | 0 | 0 | 0 | 0 | | | | | | | |
| | Endogenous | VLF | | | | | | | | | | | |
| BA5 | Naïve | MART1- | 0 | 0 | 0 | 0 | | | | | 6-5*01 | CASNQGPGNTIY | 1699 |
| | Endogenous | A2L | | | | | | | | | | F | |
| BA6 | Naïve | MART1- | 0 | 0 | 0 | 0 | 12-2*01 | CAVNKGFQKLV | | | 27*01 | CASSDSYEQYF | 1603 |
| | Endogenous | A2L | | | | | | F | | | | | 1700 |
| BA7 | Naïve | GP100- | GP100- | 0 | 0 | 0 | 17*01 | CATDGRGSTLG | | | | | 1604 |
| | Endogenous | IMD | ITD | | | | | RLYF | | | | | |
| BA8 | Naïve | PPI-15- | 0 | 0 | 0 | 0 | 12-3*01 | CAMSESDGQK | | | 4-1*01 | CASSLVPLSPEQ | 1605 |
| | Endogenous | 23 | | | | | | LLF | | | | YF | 1701 |
| BA9 | Naïve | MART1- | 0 | 0 | 0 | 0 | 13-1*01 | CAPPGDGNNR | | | 12- | CASSLGAGGGG | 1606 |
| | Endogenous | A2L | | | | | | LAF | | | 3*01,12- | TQYF | 1702 |
| | | | | | | | | | | | 4*01 | | |
| BB1 | Naïve Foreign | HBV- | 0 | 0 | 0 | 0 | | | | | 28*01 | CASSQQGVWGT | 1703 |
| | | WLS | | | | | | | | | | GELFF | |
| BB10 | Non-Naïve | IV-GIL | 0 | 0 | 0 | 0 | 27*01 | CAGAGGGSQG | | | 19*01 | CASSPRSTDTQYF | 1607 |
| | Foreign | | | | | | | NLIF | | | | F | 1704 |
| BB11 | Non-Naïve | CMV-NLV | 0 | 0 | 0 | 0 | | | | | 28*01 | CASSFQGYTEAFF | 1705 |
| | Foreign | | | | | | | | | | | F | |
| BB12 | Non-Naïve | CMV-NLV | 0 | 0 | 0 | 0 | | | | | | | |
| | Foreign | | | | | | | | | | | | |
| BB2 | Naïve Foreign | YFV-LLW | 0 | 0 | 0 | 0 | 12-2*01 | CAVNSDGQKLL | | | | | 1608 |
| | | | | | | | | F | | | | | |
| BB3 | Naïve Foreign | 0 | 0 | 0 | 0 | 0 | 3*01 | CAVRDMGSNY | | | 6-6*01 | CASSYAQGAET | 1609 |
| | | | | | | | | QLIW | | | | QYF | 1706 |
| BB4 | Naïve Foreign | HTLV- | 0 | 0 | 0 | 0 | 29/DVS* | CAASASTDKLIF | | | 27*01 | CASSLGLADPNN | 1610 |
| | | LLF | | | | | 01 | | | | | EQFF | 1707 |
| BB5 | Naïve Foreign | IV-GIL | 0 | 0 | 0 | 0 | 27*01 | CAGASTGGDS | | | | | 1611 |
| | | | | | | | | GNTGKLIF | | | | | |
| BB6 | Naïve Foreign | HTLV- | 0 | 0 | 0 | 0 | 12-3*01 | CAMSLSNFGNE | | | 20-1*01 | CSARDGGLAGE | 1612 |
| | | LLF | | | | | | KLTF | | | | QKVGDTQYF | 1708 |
| BB7 | Naïve Foreign | CMV- | 0 | 0 | 0 | 0 | 8-4*01 | CAVILQGAQKL | 8-4*01 | CAVSSITQGG | 20-1*01 | CSARGAGVPYE | 1613162 |
| | | MLN | | | | | | VF | | SEKLVF | | QYF | 71709 |
| BB8 | Naïve Foreign | CMV- | 0 | 0 | 0 | 0 | | | | | 9*01 | CASSVGVSGSF | 1710 |
| | | MLN | | | | | | | | | | YEQYF | |
| BB9 | Non-Naïve | CMV-NLV | 0 | 0 | 0 | 0 | | | | | | | |
| | Foreign | | | | | | | | | | | | |
| BC1 | Non-Naïve | IV-GIL | 0 | 0 | 0 | 0 | | | | | 19*01 | CASWDRGNEQF | 1711 |
| | Foreign | | | | | | | | | | | F | |
| BC10 | Non-Naïve | CMV-NLV | 0 | 0 | 0 | 0 | | | | | | | |
| | Foreign | | | | | | | | | | | | |
| BC11 | Non-Naïve | CMV-NLV | 0 | 0 | 0 | 0 | 3*01 | CADYYGQNFVF | | | 28*01 | CASSFQGYTEAF | 1614 |
| | Foreign | | | | | | | | | | | F | 1705 |
| BC12 | Non-Naïve | IV-GIL | 0 | 0 | 0 | 0 | 27*01 | CAGQTGNTGKL | | | | | 1615 |
| | Foreign | | | | | | | IF | | | | | |
| BC2 | Non-Naïve | CMV- | 0 | 0 | 0 | 0 | 35*01 | CAGPMKTSYDK | | | 12- | CASSSANYGYTF | 1616 |
| | Foreign | NLV | | | | | | VIF | | | 3*01,12- | | 1712 |
| | | | | | | | | | | | 4*01 | | |
| BC3 | Non-Naïve | CMV- | 0 | 0 | 0 | 0 | | | | | 12- | CASSSANYGYTF | 1712 |
| | Foreign | NLV | | | | | | | | | 3*01,12- | | |
| | | | | | | | | | | | 4*01 | | |
| BC4 | Non-Naïve | CMV-NLV | 0 | 0 | 0 | 0 | | | | | 28*01 | CASSFQGYTEAF | 1705 |
| | Foreign | | | | | | | | | | | F | |
| BC5 | Non-Naïve | CMV-NLV | 0 | 0 | 0 | 0 | 3*01 | CADYYGQNFVF | | | 28*01 | CASSFQGYTEAF | 1614 |
| | Foreign | | | | | | | | | | | F | 1705 |
| BC6 | Non-Naïve | CMV-NLV | 0 | 0 | 0 | 0 | | | | | | | |
| | Foreign | | | | | | | | | | | | |
| BC7 | Non-Naïve | IV-GIL | 0 | 0 | 0 | 0 | | | | | | | |
| | Foreign | | | | | | | | | | | | |
| BC8 | Non-Naïve | IV-GIL | 0 | 0 | 0 | 0 | | | | | 3-1*01 | CASSQFRGGRD | 1713 |
| | Foreign | | | | | | | | | | | GYTF | |
| BC9 | Non-Naïve | CMV-NLV | 0 | 0 | 0 | 0 | 3*01 | CADYYGQNFVF | | | 28*01 | CASSFQGYTEAF | 1614 |
| | Foreign | | | | | | | | | | | F | 1705 |
| BD1 | Non-Naïve | CMV- | 0 | 0 | 0 | 0 | 35*01 | CAGPMKTSYDK | | | 12- | CASSSANYGYTF | 1616 |
| | Foreign | NLV | | | | | | VIF | | | 3*01,12- | | 1712 |
| | | | | | | | | | | | 4*01 | | |
| BD10 | Non-Naïve | CMV- | 0 | 0 | 0 | 0 | | | | | 12- | CASSSANYGYTF | 1712 |
| | Foreign | NLV | | | | | | | | | 3*01,12- | | |
| | | | | | | | | | | | 4*01 | | |
| BD11 | Non-Naïve | IV-GIL | 0 | 0 | 0 | 0 | | | | | | | |
| | Foreign | | | | | | | | | | | | |
| BD12 | Non-Naïve | CMV- | 0 | 0 | 0 | 0 | 24*01 | CARNTGNQFYF | | | 6-5*01 | CASSYSTGTAYG | 1617 |
| | Foreign | NLV | | | | | | | | | | YTF | 1714 |
| BD2 | Non-Naïve | CMV- | 0 | 0 | 0 | 0 | 35*01 | CAGPMKTSYDK | | | 12- | CASSSANYGYTF | 1616 |
| | Foreign | NLV | | | | | | VIF | | | 3*01,12- | | 1712 |
| | | | | | | | | | | | 4*01 | | |
| BD3 | Non-Naïve | IV-GIL | 0 | 0 | 0 | 0 | 30*01 | CGTLRNNNARL | | | | | 1618 |
| | Foreign | | | | | | | MF | | | | | |
| BD4 | Non-Naïve | IV-GIL | 0 | 0 | 0 | 0 | | | | | | | |
| | Foreign | | | | | | | | | | | | |
| BD5 | Non-Naïve | IV-GIL | 0 | 0 | 0 | 0 | 27*01 | CAGGGSQGNLI | | | 19*01 | CASSIRSSYEQY | 1592 |
| | Foreign | | | | | | | F | | | | F | 1715 |
| BD6 | Non-Naïve | IV-GIL | 0 | 0 | 0 | 0 | | | | | 9*01 | CASSARDFAYE | 1716 |
| | Foreign | | | | | | | | | | | QYF | |
| BD7 | Non-Naïve | CMV- | 0 | 0 | 0 | 0 | | | | | 12- | CASSSANYGYTF | 1712 |
| | Foreign | NLV | | | | | | | | | 3*01,12- | | |
| | | | | | | | | | | | 4*01 | | |
| BD8 | Non-Naïve | IV-GIL | 0 | 0 | 0 | 0 | 30*01 | CGTLRNNNARL | | | 19*01 | CASWDRGNEQF | 1618 |
| | Foreign | | | | | | | MF | | | | F | 1711 |
| BD9 | Non-Naïve | IV-GIL | 0 | 0 | 0 | 0 | 27*01 | CAGDKGGGSQ | | | | | 1619 |
| | Foreign | | | | | | | GNLIF | | | | | |
| BE1 | Non-Naïve | IV-GIL | 0 | 0 | 0 | 0 | | | | | | | |
| | Foreign | | | | | | | | | | | | |
| BE10 | Non-Naïve | MART1- | 0 | 0 | 0 | 0 | 12-2*01 | CAVTGGGTSY | | | 27*01 | CASSFALSNEAF | 1620 |
| | Endogenous | A2L | | | | | | GKLTF | | | | F | 1717 |
| BE11 | Non-Naïve | PD5-KLS | 0 | 0 | 0 | 0 | | | | | 6-1*01 | CASDEKLFF | 1718 |
| | Endogenous | | | | | | | | | | | | |
| BE12 | Non-Naïve | MART1- | 0 | 0 | 0 | 0 | | | | | 27*01 | CASSFAGTTEAF | 1719 |
| | Endogenous | A2L | | | | | | | | | | F | |
| BE2 | Non-Naïve | IV-GIL | 0 | 0 | 0 | 0 | | | | | | | |
| | Foreign | | | | | | | | | | | | |
| BE3 | Non-Naïve | IV-GIL | 0 | 0 | 0 | 0 | | | | | | | |
| | Foreign | | | | | | | | | | | | |
| BE4 | Non-Naïve | CMV-NLV | 0 | 0 | 0 | 0 | | | | | 28*01 | CASSFQGYTEAF | 1705 |
| | Foreign | | | | | | | | | | | F | |
| BE6 | Non-Naïve | MART1- | 0 | 0 | 0 | 0 | | | | | | | |
| | Endogenous | A2L | | | | | | | | | | | |
| BE7 | Non-Naïve | MART1- | 0 | 0 | 0 | 0 | | | | | 27*01 | CASSFAGTTEAF | 1719 |
| | Endogenous | A2L | | | | | | | | | | F | |
| BE8 | Non-Naïve | MART1- | 0 | 0 | 0 | 0 | 12-2*01 | CAVTAGGTSYG | | | | | 1621 |
| | Endogenous | A2L | | | | | | KLTF | | | | | |
| BE9 | Non-Naïve | MART1- | 0 | 0 | 0 | 0 | 12-2*01 | CAVTAGGTSYG | | | | | 1621 |
| | Endogenous | A2L | | | | | | KLTF | | | | | |
| BF1 | Non-Naïve | MART1- | 0 | 0 | 0 | 0 | | | | | 27*01 | CASSFAGTTEAF | 1719 |
| | Endogenous | A2L | | | | | | | | | | F | |
| BF10 | Non-Naïve | MART1- | 0 | 0 | 0 | 0 | | | | | | | 1621162 |
| | Endogenous | A2L | | | | | | | | | | | 4 |
| BF11 | Non-Naïve | MART1- | 0 | 0 | 0 | 0 | 12-2*01 | CAVTAGGTSYG | 38-2/DV8* | CAYRSPPSS | | | 1621161 |
| | Endogenous | A2L | | | | | | KLTF | 01 | EKLVF | | | 8 |
| BF12 | Non-Naïve | MART1- | 0 | 0 | 0 | 0 | 12-2*01 | CAVTAGGTSYG | 30*01 | CGTLRNNNA | | | |
| | Endogenous | A2L | | | | | | KLTF | | RLMF | | | |
| BF2 | Non-Naïve | TYR- | 0 | 0 | 0 | 0 | | | | | 29-1*01 | CSVTGTGLFDEQ | 1720 |
| | Endogenous | YMD | | | | | | | | | | YF | |
| BF3 | Non-Naïve | MART1- | 0 | 0 | 0 | 0 | | | | | 27*01 | CASSFAGTTEAF | 1719 |
| | Endogenous | A2L | | | | | | | | | | F | |
| BF4 | Non-Naïve | MART1- | 0 | 0 | 0 | 0 | | | | | 27*01 | CASSFAGTTEAFF | 1719 |
| | Endogenous | A2L | | | | | | | | | | F | |
| BF5 | Non-Naïve | MART1- | 0 | 0 | 0 | 0 | 12-2*01 | CAVTAGGTSYG | | | | | 1621 |
| | Endogenous | A2L | | | | | | KLTF | | | | | |
| BF6 | Non-Naïve | PD5-KLS | 0 | 0 | 0 | 0 | | | | | | | |
| | Endogenous | | | | | | | | | | | | |
| BF7 | Non-Naïve | MART1- | 0 | 0 | 0 | 0 | | | | | 27*01 | CASSFAGTTEAF | 1719 |
| | Endogenous | A2L | | | | | | | | | | F | |
| BF8 | Non-Naïve | CD1-LLG | 0 | 0 | 0 | 0 | 12-2*01 | CAVYSGGYNKL | | | 27*01 | CASSFVNTGELF | 1622 |
| | Endogenous | | | | | | | IF | | | | F | 1721 |
| BF9 | Non-Naïve | MART1- | 0 | 0 | 0 | 0 | | | | | | | |
| | Endogenous | A2L | | | | | | | | | | | |
| BG1 | Non-Naïve | MART1- | 0 | 0 | 0 | 0 | | | | | | | |
| | Endogenous | A2L | | | | | | | | | | | |
| BG2 | Non-Naïve | MART1- | 0 | 0 | 0 | 0 | 12-2*01 | CAVTAGGTSYG | | | 27*01 | CASSFAGTTEAF | 1621 |
| | Endogenous | A2L | | | | | | KLTF | | | | F | 1719 |
| BG3 | Non-Naïve | MART1- | 0 | 0 | 0 | 0 | | | | | | | |
| | Endogenous | A2L | | | | | | | | | | | |
| BG4 | Non-Naïve | MART1- | 0 | 0 | 0 | 0 | 12-2*01 | CALPSGNTPLV | | | 6-1*01 | CASSDPGSGAY | 1623 |
| | Endogenous | A2L | | | | | | F | | | | EQYF | 1722 |
| BH10 | Spike-In | HCV-K1Y | HCV- | HCV- | HCV- | HCV- | 38- | CAYRSPPSSEK | | | 28*01 | CASSFLGTGLNE | 1624 |
| | | | L2I | K1Y17V | K1S | KLV | 2/DV8* | LVF | | | | QYF | 1723 |
| | | | | | | | 01 | | | | | | |
| BH2 | Spike-In | HCV-K1Y | HCV- | HCV- | HCV- | HCV- | 38- | CAYRSPPSSEK | | | 28*01 | CASSFLGTGLNE | 1624 |
| | | | L2I | K1Y17V | K1S | KLV | 2/DV8* | LVF | | | | QYF | 1723 |
| | | | | | | | 01 | | | | | | |
| BH3 | Spike-In | HCV-K1Y | HCV- | HCV- | HCV- | HCV- | 38- | CAYRSPPSSEK | | | 28*01 | CASSFLGTGLNE | 1624 |
| | | | L2I | K1Y17V | K1S | KLV | 2/DV8* | LVF | | | | QYF | 1723 |
| | | | | | | | 01 | | | | | | |
| BH4 | Spike-In | HCV-K1Y | HCV- | HCV- | HCV- | HCV- | 38- | CAYRSPPSSEK | | | 28*01 | CASSFLGTGLNE | 1624 |
| | | | L2I | K1S | K1Y17V | KLV | 2/DV8* | LVF | | | | QYF | 1723 |
| | | | | | | | 01 | | | | | | |
| BH5 | Spike-In | HCV-K1Y | HCV- | HCV- | HCV- | HCV- | 38- | CAYRSPPSSEK | | | 28*01 | CASSFLGTGLNE | 1624 |
| | | | L2I | K1Y17V | K1S | KLV | 2/DV8* | LVF | | | | QYF | 1723 |
| | | | | | | | 01 | | | | | | |
| BH6 | Spike-In | HCV-K1Y | HCV- | HCV- | HCV- | HCV- | 38- | CAYRSPPSSEK | | | 28*01 | CASSFLGTGLNE | 1624 |
| | | | L2I | K1S | K1Y17V | KLV | 2/DV8* | LVF | | | | QYF | 1723 |
| | | | | | | | 01 | | | | | | |
| BH7 | Spike-In | HCV-K1Y | HCV- | HCV- | HCV- | HCV- | 38- | CAYRSPPSSEK | | | 28*01 | CASSFLGTGLNE | 1624 |
| | | | L2I | K1Y17V | K1S | KLV | 2/DV8* | LVF | | | | QYF | 1723 |
| | | | | | | | 01 | | | | | | |
| BH8 | Spike-In | HCV-K1Y | HCV- | HCV- | HCV- | HCV- | 38- | CAYRSPPSSEK | | | 28*01 | CASSFLGTGLNE | 1624 |
| | | | L2I | K1Y17V | K1S | KLV | 2/DV8* | LVF | | | | QYF | 1723 |
| | | | | | | | 01 | | | | | | |

TABLE 4
TetTCR summary for experiment 2

| | | | | | | | | | | | | | SEQ ID |
|---|---|---|---|---|---|---|---|---|---|---|---|---|---|
| Cell | Sorted | Detected Peptide by MID Count | | | | | TCRα,1 | | TCRα,2 | | TCRβ | | NO |
| Name | Population | Rank 1 | Rank 2 | Rank 3 | Rank 4 | Rank 5 | TRAV | CDR3α | TRAV | CDR3α | TRBV | CDR3β | (L to R) |
| WA11 | Clone | HCV_K1Y | HCV_L2I | HCV_K1S | HCV_ | HCV_ | 38- | CAYRSPPSSEKL | | | 28 | CASSFLGTGLNE | 1721 |
| | | | | | K1Y17V | KLV | 2/DV8 | VF | | | | QYF | 1889 |
| WB11 | Clone | HCV_K1Y | HCV_L2I | HCV_K1S | HCV_ | HCV_ | 38- | CAYRSPPSSEKL | | | 28 | CASSFLGTGLNE | 1724 |
| | | | | | K1Y17V | KLV | 2/DV8 | VF | | | | QYF | 1889 |
| WC11 | Clone | HCV_K1Y | HCV_K1S | HCV_L2I | HCV_ | HCV_ | 38- | CAYRSPPSSEKL | | | 28 | CASSFLGTGLNE | 1724 |
| | | | | | K1Y17V | KLV | 2/DV8 | VF | | | | QYF | 1889 |
| WD11 | Clone | 0 | 0 | 0 | 0 | 0 | | | | | | | |
| WE11 | Clone | HCV_K1Y | HCV_L2I | HCV_K1S | HCV_ | HCV_ | 38- | CAYRSPPSSEKL | | | 28 | CASSFLGTGLNE | 1724 |
| | | | | | K1Y17V | KLV | 2/DV8 | VF | | | | QYF | 1889 |
| WF11 | Clone | HCV_K1Y | HCV_L2I | HCV_ | HCV_K1S | HCV_ | 38- | CAYRSPPSSEKL | | | 28 | CASSFLGTGLNE | 1724 |
| | | | | K1Y17V | | KLV | 2/DV8 | VF | | | | QYF | 1889 |
| WG11 | Clone | HCV_K1Y | HCV_L2I | HCV_K1S | HCV_ | HCV_ | 38- | CAYRSPPSSEKL | | | 28 | CASSFLGTGLNE | 1724 |
| | | | | | K1Y17V | KLV | 2/DV8 | VF | | | | QYF | 1889 |
| WH11 | Clone | HCV_K1Y | HCV_L2I | HCV_K1S | HCV_ | HCV_ | 38- | CAYRSPPSSEKL | | | 28 | CASSFLGTGLNE | 1724 |
| | | | | | K1Y17V | KLV | 2/DV8 | VF | | | | QYF | 1889 |
| TA1 | Foreign_ | YFV_LLW | 0 | 0 | 0 | 0 | 2-Dec | CAVNSDGQKLLF | | | 3-Oct | CAISEGAAYGYTF | 1725 |
| | Naive | | | | | | | | | | | | 1890 |
| TA2 | Foreign_ | YFV_LLW | 0 | 0 | 0 | 0 | 2-Dec | CAPGDDKIIF | | | 15 | CATSSSGAYEQY | 1726 |
| | Naive | | | | | | | | | | | F | 1891 |
| TA3 | Foreign_ | EBV_YVL | 0 | 0 | 0 | 0 | 17 | CASSGLSSGGSY | | | | | 1727 |
| | Naive | | | | | | | IPTF | | | | | |
| TB1 | Foreign_ | HCV_L2I | 0 | 0 | 0 | 0 | 38- | CAYRLGGSEKLV | | | 13 | CASSFPPAGTGE | 1728 |
| | Naive | | | | | | 2/DV8 | F | | | | LFF | 1892 |
| TB2 | Foreign_ | CMV_MLN | 0 | 0 | 0 | 0 | 14/DV4 | CAMRGGLYNFNK | | | 1-Apr | CASSPQGQGESG | 1729 |
| | Naive | | | | | | | FYF | | | | ANVLTF | 1893 |
| TB3 | Foreign_ | YFV_LLW | 0 | 0 | 0 | 0 | 2-Dec | CAVTDYKLSF | 5 | CAGRSYNTNAGK | 1-Jun | CASSEALYEQYF | 1730 |
| | Naive | | | | | | | | | STF | | | 1879 |
| | | | | | | | | | | | | | 1894 |
| TC1 | Foreign_ | YFV_LLW | 0 | 0 | 0 | 0 | 2-Dec | CALQDDKIIF | | | 1-Apr | CASSQGAAYEQY | 1731 |
| | Naive | | | | | | | | | | | F | 1895 |
| TC2 | Foreign_ | 0 | 0 | 0 | 0 | 0 | | | | | | CASSDGVSYGYT | 1896 |
| | Naive | | | | | | | | | | 2 | F | |
| TC3 | Foreign_ | CMV_MLN | 0 | 0 | 0 | 0 | 17 | CATGDLGNQFYF | | | 8-Jul | CASSLGFGYEQF | 1732 |
| | Naive | | | | | | | | | | | F | 1897 |
| TD1 | Foreign_ | YFV_LLW | 0 | 0 | 0 | 0 | | | | | | | |
| | Naive | | | | | | | | | | | | |
| TD2 | Foreign_ | YFV_LLW | HA_VLH | 0 | 0 | 0 | 2-Dec | CAVNSDGQKLLF | | | | | 1725 |
| | Naive | | | | | | | | | | | | |
| TD3 | Foreign_ | EBV_GLC | 0 | 0 | 0 | 0 | | | | | 20-1 | CSARSGVGNTIYF | 1898 |
| | Naive | | | | | | | | | | | | |
| TE1 | Foreign_ | 0 | 0 | 0 | 0 | 0 | 14/DV4 | CAMRELTSGTYK | | | 20-1 | CSPLGGQGVWD | 1733 |
| | Naive | | | | | | | YIF | | | | EQFF | 1899 |
| TE2 | Foreign_ | CMV_NLV | 0 | 0 | 0 | 0 | 24 | CARNTGNQFYF | | | | | 1734 |
| | Naive | | | | | | | | | | | | |
| TE3 | Foreign_ | 0 | 0 | 0 | 0 | 0 | 5 | CAEQGGSARQLT | 12-2 | CAVSTDKLIF | | | 1735 |
| | Naive | | | | | | | F | | | | | 1880 |
| TF1 | Foreign_ | HCV_LLF | 0 | 0 | 0 | 0 | | | | | 3-Oct | CAISEPGTGDTEA | 1900 |
| | Naive | | | | | | | | | | | FF | |
| TF2 | Foreign_ | IV_GIL | 0 | 0 | 0 | 0 | 17 | CATDAVSGTGGT | | | 19 | CASSIYGAGYTEA | 1736 |
| | Naive | | | | | | | SYGKLTF | | | | FF | 1901 |
| TF3 | Foreign_ | YFV_LLW | 0 | 0 | 0 | 0 | 1-Dec | CVVNDNDMRF | | | 27 | CASSFGASYGYT | 1737 |
| | Naive | | | | | | | | | | | F | 1902 |
| TG1 | Foreign_ | YFV_LLW | HAFP_F | 0 | 0 | 0 | 10 | CVVSPYSRVCTQ | 12-2 | CAVSNQGGKLIF | | | 1738 |
| | Naive | | MN | | | | | L | | | | | 1881 |
| TG2 | Foreign_ | YFV_LLW | 0 | 0 | 0 | 0 | 2-Dec | CAVSEDKLSF | | | | | 1739 |
| | Naive | | | | | | | | | | | | |
| TG3 | Foreign_ | YFV_LLW | 0 | 0 | 0 | 0 | 2-Dec | CAVSGGSYIPTF | | | | | 1740 |
| | Naive | | | | | | | | | | | | |
| TH1 | Foreign_ | HSV_SLP | 0 | 0 | 0 | 0 | 2-Dec | CAVGSARQLTF | | | 24-1 | CATSVGSGPLST | 1741 |
| | Naive | | | | | | | | | | | DTQYF | 1903 |
| TH2 | Foreign_ | 0 | 0 | 0 | 0 | 0 | 1-Dec | CVVTASNDMRF | | | 14 | CASSQETSPNYG | 1742 |
| | Naive | | | | | | | | | | | YTF | 1904 |
| TH3 | Foreign_ | HCV_YLL | 0 | 0 | 0 | 0 | 38- | CACADYGGSQG | | | | | 1743 |
| | Naive | | | | | | 2/DV8 | NLIF | | | | | |
| UA1 | Foreign_ | CMV_NLV | IV_GIL | 0 | 0 | 0 | 24 | CATNTGNQFYF | | | 1-Jun | CASSPTTRTRYY | 1744 |
| | Naive | | | | | | | | | | | GYTF | 1905 |
| UA2 | Foreign_ | YFV_LLW | 0 | 0 | 0 | 0 | 1-Dec | CAFEGGKLIF | | | 20-1 | CSAIGPRGTDTQY | 1745 |
| | Naive | | | | | | | | | | | F | 1906 |
| UA3 | Foreign_ | 0 | 0 | 0 | 0 | 0 | 2-Dec | CAVNNDYKLSF | | | 3-1 | CASSQEMASVQE | 1746 |
| | Naive | | | | | | | | | | | TQYF | 1907 |
| UB1 | Foreign_ | YFV_LLW | 0 | 0 | 0 | 0 | 2-Dec | CAVTGNQFYF | | | 11-2 | CASSLGGQGAYE | 1747 |
| | Naive | | | | | | | | | | | QYF | 1908 |
| UB2 | Foreign_ | YFV_LLW | 0 | 0 | 0 | 0 | 2-Dec | CAGNNARLMF | | | 15 | CATSPRGGHEQY | 1748 |
| | Naive | | | | | | | | | | | F | 1909 |
| UB3 | Foreign_ | HCV_LLF | 0 | 0 | 0 | 0 | 38-1 | CALDAGNMLTF | | | 28 | CASLGLEYEQYF | 1749 |
| | Naive | | | | | | | | | | | | 1910 |
| UC1 | Foreign_ | YFV_LLW | 0 | 0 | 0 | 0 | 2-Dec | CAAGDARLMF | | | | | 1750 |
| | Naive | | | | | | | | | | | | |
| UC2 | Foreign_ | IVPA_FMY | 0 | 0 | 0 | 0 | 38- | CAYIWGDKIIF | | | | | 1753 |
| | Naive | | | | | | 2/DV8 | | | | | | 1911 |
| UC3 | Foreign_ | YFV_LLW | 0 | 0 | 0 | 0 | 39 | CAVDSGDMRF | | | | | 1752 |
| | Naive | | | | | | | | | | | | |
| UD1 | Foreign_ | YFV_LLW | 0 | 0 | 0 | 0 | | | | | | | |
| | Naive | | | | | | | | | | | | |
| UD2 | Foreign_ | 0 | 0 | 0 | 0 | 0 | 38- | CAYYGGSQGNLI | | | 13 | CASSATGVSPYE | 1753 |
| | Naive | | | | | | 2/DV8 | F | | | | QYF | 1911 |
| UD3 | Foreign_ | CMV_MLN | 0 | 0 | 0 | 0 | | | | | 19 | CASSQGLSYEQY | |
| | Naive | | | | | | | | | | | F | |
| UE1 | Foreign_ | 0 | 0 | 0 | 0 | 0 | 2-Dec | CAVITGGGNKLTF | | | 9 | CASSVAGSTEAFF | 1754 |
| | Naive | | | | | | | | | | | | 1913 |
| UE2 | Foreign_ | CMV_MLN | 0 | 0 | 0 | 0 | 3-Aug | CAVGMDSSYKLI | 10 | CVVSAMGGGNK | 1-Jun | CASNQPQHF | 1755 |
| | Naive | | | | | | | F | | LTF | | | 1882 |
| | | | | | | | | | | | | | 1914 |
| UE3 | Foreign_ | CMV_MLN | 0 | 0 | 0 | 0 | 4 | CLVGDVQEGFQK | | | 20-1 | CSARDPSQGGYE | |
| | Naive | | | | | | | LVF | | | | QYF | |
| UF1 | Foreign_ | YFV_LLW | IV_AIM | 0 | 0 | 0 | 1-Dec | CVVADDKIIF | | | 9 | CASSVDGGSQPQ | 1757 |
| | Naive | | | | | | | | | | | HF | 1916 |
| UF2 | Foreign_ | HSV_SLP | 0 | 0 | 0 | 0 | | | | | 2-Nov | CASSLPAGVGDT | 1917 |
| | Naive | | | | | | | | | | | QYF | |
| UF3 | Foreign_ | HCV_L2I | HCV_KLV | 0 | 0 | 0 | 38- | CASLRNMLTF | 38- | CALLDGNKLVF | 19 | CASSIGLNQPQHF | 1758 |
| | Naive | | | | | | 2/DV8 | | 2/DV8 | | | | 1883 |
| | | | | | | | | | | | | | 1918 |
| UG1 | Foreign_ | YFV_LLW | 0 | 0 | 0 | 0 | 24 | CARNTGNQFYF | | | 9 | CASSVGGVPYNE | 1734 |
| | Naive | | | | | | | | | | | QFF | 1919 |
| UG2 | Foreign_ | CMV_MLN | 0 | 0 | 0 | 0 | 2-Aug | CVVSVSGGYNKL | | | 2-Nov | CASSLVESEQFF | 1759 |
| | Naive | | | | | | | IF | | | | | 1920 |
| UG3 | Foreign_ | 0 | 0 | 0 | 0 | 0 | 14/DV4 | CAMRVRTWGQN | | | 12-3, | CASSFANSPLHF | 1760 |
| | Naive | | | | | | | FVF | | | 12-4 | | 1921 |
| UH1 | Foreign_ | YFV_LLW | 0 | 0 | 0 | 0 | 1-Dec | CVVSDDKIIF | | | 27 | CASSLTALGAAYV | 1761 |
| | Naive | | | | | | | | | | | YTF | 1922 |
| UH2 | Foreign_ | HCV_L2I | 0 | 0 | 0 | 0 | | | | | | | |
| | Naive | | | | | | | | | | 20-1 | CSATEGSGYTF | 1923 |
| UH3 | Foreign_ | YFV_LLW | 0 | 0 | 0 | 0 | | | | | 13 | CASSRRDSNTEA | 1924 |
| | Naive | | | | | | | | | | | FF | |
| VA1 | Foreign_ | YFV_LLW | 0 | 0 | 0 | 0 | 39 | CAWYSGGGADG | | | 5-May | CASSFWGADTQY | 1762 |
| | Naive | | | | | | | LTF | | | | F | 1925 |
| VA2 | Foreign_ | IV_GIL | 0 | 0 | 0 | 0 | 2-Dec | CAVSPFGNVLHC | | | 2 | CASTGQNPEAFF | 1763 |
| | Naive | | | | | | | | | | | | 1926 |
| VA3 | Foreign_ | HSV_SLP | 0 | 0 | 0 | 0 | 4-Aug | CAVSETGAGNNR | 41 | CAVEGSRLTF | 1-Jun | CASSEVRGPWAE | 1764 |
| | Naive | | | | | | | KLIW | | | | TQYF | 1863 |
| | | | | | | | | | | | | | 1967 |
| VB1 | Foreign_ | YFV_LLW | 0 | 0 | 0 | 0 | 2-Dec | CAVSDDKIIF | | | 15 | CATSRTGTGSTE | 1765 |
| | Naive | | | | | | | | | | | AFF | 1928 |
| VB2 | Foreign_ | 0 | 0 | 0 | 0 | 0 | | | | | | | |
| | Naive | | | | | | | | | | | | |
| VB3 | Foreign_ | IVPA_FMY | 0 | 0 | 0 | 0 | | | | | 3-Apr | CASSPTGTGYNE | 1929 |
| | Naive | | | | | | | | | | | QFF | |
| VC1 | Foreign_ | YFV_LLW | 0 | 0 | 0 | 0 | 2-Dec | CAVRLGGADGLT | | | 20-1 | CSAWWGAEQYF | 1766 |
| | Naive | | | | | | | F | | | | | 1930 |
| VC2 | Foreign_ | YFV_LLW | 0 | 0 | 0 | 0 | 14/DV4 | CAMRSSDPGGY | | | 19 | CASSIQGRGDTE | 1767 |
| | Naive | | | | | | | NKLIF | | | | AFF | 1931 |
| VC3 | Foreign_ | HAFP_GLS | HTLV_LLF | 0 | 0 | 0 | 1-Dec | CVVNGGGYQKV | | | 9 | CASSAGLFPEQFF | 1768 |
| | Naive | | | | | | | TF | | | | | 1932 |
| VD1 | Foreign_ | IV_GIL | 0 | 0 | 0 | 0 | 3-Dec | CAMSQDYNTDKL | | | 2 | CASRTRQEAFF | 1769 |
| | Naive | | | | | | | IF | | | | | 1933 |
| VD2 | Foreign_ | EBV_YVL | 0 | 0 | 0 | 0 | | | | | 19 | CASSIVGNTEAFF | 1934 |
| | Naive | | | | | | | | | | | | |
| VD3 | Foreign_ | ALADH_VLM | 0 | 0 | 0 | 0 | | | | | 8-Jul | CASSFWGLGELF | 1935 |
| | Naive | | | | | | | | | | | F | |
| VE1 | Foreign_ | YFV_LLW | 0 | 0 | 0 | 0 | 2-Dec | CAVTNDKIIF | | | 9 | CASSPMNEQFF | 1770 |
| | Naive | | | | | | | | | | | | 1936 |
| VE2 | Foreign_ | YFV_LLW | 0 | 0 | 0 | 0 | 27 | CAGASTGDYKLS | | | 25-1 | CASGRGPNYGYT | 1771 |
| | Naive | | | | | | | F | | | | F | 1937 |
| VE3 | Foreign_ | HPV_YML | 0 | 0 | 0 | 0 | | | | | 1-May | CASSLLGLIKETQ | 1938 |
| | Naive | | | | | | | | | | | YF | |
| VF1 | Foreign_ | YFV_LLW | 0 | 0 | 0 | 0 | | | | | 9 | CASSDSYEQYF | 1939 |
| | Naive | | | | | | | | | | | | |
| VF2 | Foreign_ | YFV_LLW | 0 | 0 | 0 | 0 | 2-Dec | CAVVGGYNKLIF | | | 1-Mar | CASSPGQVSYEQ | 1772 |
| | Naive | | | | | | | | | | | YF | 1940 |
| VF3 | Foreign_ | EBV_YVL | 0 | 0 | 0 | 0 | 2-Dec | CAVITGGGNKLTF | | | 1-May | CASSLAGGGEQY | 1754 |
| | Naive | | | | | | | | | | | F | 1941 |
| VG1 | Foreign_ | IV_GIL | 0 | 0 | 0 | 0 | 38- | CDPSGGNNRKLI | | | 19 | CASSVYSGGYNE | 1773 |
| | Naive | | | | | | 2/DV8 | W | | | | QFF | 1942 |
| VG2 | Foreign_ | 0 | 0 | 0 | 0 | 0 | 29/DV5 | CAATQGGSEKLV | | | 9 | CASSVGVGTDTQ | 1774 |
| | Naive | | | | | | | F | | | | YF | 1943 |
| VG3 | Foreign_ | EBV_YVL | 0 | 0 | 0 | 0 | | | | | 29-1 | CSVDNKAGGGYT | 1944 |
| | Naive | | | | | | | | | | | F | |
| VH1 | Foreign_ | HCV_A9N | 0 | 0 | 0 | 0 | 38- | CAYGSNNNDMR | | | 5-Jun | CASSYSPGTGNTI | 1775 |
| | Naive | | | | | | 2/DV8 | F | | | | YF | 1945 |
| VH2 | Foreign_ | YFV_LLW | 0 | 0 | 0 | 0 | 2-Dec | CAVSDDKIIF | | | 1-Jun | CASSEGPGQGSY | 1965 |
| | Naive | | | | | | | | | | | EQYF | 1946 |
| VH3 | Foreign_ | YFV_LLW | MART1_ | 0 | 0 | 0 | 2-Dec | CAVNNARLMF | | | | | 1776 |
| | Naive | | A2L | | | | | | | | | | |
| WA1 | Foreign_ | YFV_LLW | 0 | 0 | 0 | 0 | | | | | 2 | CASSEAFGRPNY | 1947 |
| | Naive | | | | | | | | | | | GYTF | |
| WA2 | Foreign_ | 0 | 0 | 0 | 0 | 0 | 3-Aug | CAVGAGPGAGS | | | 1-Jun | CASRSHPTYEQY | 1777 |
| | Naive | | | | | | | YQLTF | | | | F | 1948 |
| WA3 | Foreign_ | HSV_SLP | 0 | 0 | 0 | 0 | 14/DV4 | CAMREGTTDSW | | | 20-1 | CSARDLGLHQPQ | 1778 |
| | Naive | | | | | | | GKLQF | | | | HF | 1949 |
| WB1 | Foreign_ | YFV_LLW | 0 | 0 | 0 | 0 | 2-Dec | CAVDRDDKIIF | | | 27 | CASSFDLAGVNY | 1779 |
| | Naive | | | | | | | | | | | EQYF | 1950 |
| WB2 | Foreign_ | 0 | 0 | 0 | 0 | 0 | 17 | CASSGLSSGGSY | | | 1-Mar | CASSPLRGPADR | 1727 |
| | Naive | | | | | | | IPTF | | | | TGTEAFF | 1951 |
| WB3 | Foreign_ | CMV_MLN | 0 | 0 | 0 | 0 | 20 | CAVQAADSSASK | | | 2-Jul | CASSFWAGGWT | 1780 |
| | Naive | | | | | | | IIF | | | | EAFF | 1952 |
| WC1 | Foreign_ | YFV_LLW | 0 | 0 | 0 | 0 | | | | | 5-Jun | CASSYGSNYGYT | 1953 |
| | Naive | | | | | | | | | | | F | |
| WC2 | Foreign_ | HCV_LLF | 0 | 0 | 0 | 0 | 4 | CLVGGYSGGYQ | 3 | CAVRDMHPRGY | 15 | CATRGGEGQPQH | 1781 |
| | Naive | | | | | | | KVTF | | NKLIF | | F | 1884 |
| | | | | | | | | | | | | | 1954 |
| WC3 | Foreign_ | HTLV_LLF | HAFP_GLS | 0 | 0 | 0 | 3 | CAVRDYGNNRLA | | | | | 1782 |
| | Naive | | | | | | | F | | | | | |
| WD1 | Foreign_ | HCV_YLL | 0 | 0 | 0 | 0 | | | | | 1-Nov | CASSLGDWDLEA | 1955 |
| | Naive | | | | | | | | | | | FF | |
| WD2 | Foreign_ | YFV_LLW | 0 | 0 | 0 | 0 | 25 | CAGIDNAGNMLT | | | | | 1783 |
| | Naive | | | | | | | F | | | | | |
| WD3 | Foreign_ | YFV_LLW | 0 | 0 | 0 | 0 | 29/DV5 | CAAKDNRKLIW | | | 27 | CASGPGTAYGYT | 1784 |
| | Naive | | | | | | | | | | | F | 1956 |
| WE1 | Foreign_ | CMV_MLN | 0 | 0 | 0 | 0 | 4 | CLAFSGGYNKLIF | | | 27 | CASSLGPAYNEQ | 1785 |
| | Naive | | | | | | | | | | | FF | 1957 |
| WE2 | Foreign_ | YFV_LLW | 0 | 0 | 0 | 0 | 24 | CASSTDSWGKLQ | | | 2-Apr | CASSHDAGASTG | 1786 |
| | Naive | | | | | | | F | | | | ELFF | 1958 |
| WE3 | Foreign_ | YFV_LLW | 0 | 0 | 0 | 0 | | | | | 6-2, 6-3 | CASSSGAAYEQY | 1959 |
| | Naive | | | | | | | | | | | F | |
| WF1 | Foreign_ | CMV_MLN | 0 | 0 | 0 | 0 | 19 | CALSEAGYGNNR | | | 2 | CASSESFPASGG | 1787 |
| | Naive | | | | | | | LAF | | | | STDTQYF | 1960 |
| WF2 | Foreign_ | CMV_NLV | 0 | 0 | 0 | 0 | 3 | CAVNYGNMLTF | 14/DV4 | CAMRAFGADGQ | 5-Jun | CASSYATEVAGE | 1788 |
| | Naive | | | | | | | | | KLLF | | TQYF | 1885 |
| | | | | | | | | | | | | | 1961 |
| WF3 | Foreign_ | CMV_MLN | 0 | 0 | 0 | 0 | 14/DV4 | CAMREGMDSSY | | | 2 | CASMTNNQPQHF | 1789 |
| | Naive | | | | | | | KLIF | | | | | 1962 |
| WG1 | Foreign_ | YFV_LLW | 0 | 0 | 0 | 0 | 2-Dec | CAVIGSGKLIF | | | 1-Apr | CASSQTAGGYEQ | 1790 |
| | Naive | | | | | | | | | | | YF | 1963 |
| WG2 | Foreign_ | YFV_LLW | 0 | 0 | 0 | 0 | | | | | 9 | CASSVGGVSYNE | 1964 |
| | Naive | | | | | | | | | | | QFF | |
| WG3 | Foreign_ | EBV_YVL | 0 | 0 | 0 | 0 | 17 | CASSGLSSGGSY | | | 1-Mar | CASSPLRGPADR | 1727 |
| | Naive | | | | | | | IPTF | | | | TGTEAFF | 1951 |
| WH1 | Foreign_ | YFV_LLW | 0 | 0 | 0 | 0 | | | | | 2-Apr | CASSQVSSTGEL | 1965 |
| | Naive | | | | | | | | | | | FF | |
| WH2 | Foreign_ | CMV_MLN | 0 | 0 | 0 | 0 | 27 | CAGASSNTGKLIF | | | | | 1791 |
| | Naive | | | | | | | | | | | | |
| WH3 | Foreign_ | HBV_WLS | 0 | 0 | 0 | 0 | 2-Dec | CAVMADGQKLLF | | | 6-May | CASSQTIGTGFSN | 1792 |
| | Naive | | | | | | | | | | | EQFF | 1966 |
| TA7 | Foreign_ | CMV_NLV | 0 | 0 | 0 | 0 | 26-2 | CILSNNNDMRF | | | 30 | CAWSISDSSRVE | 1793 |
| | Nonnaive | | | | | | | | | | | AFF | 1967 |
| TA8 | Foreign_ | CMV_NLV | 0 | 0 | 0 | 0 | 35 | CAAPRETSYDKVI | | | | | 1794 |
| | Nonnaive | | | | | | | F | | | | | |
| TA9 | Foreign_ | CMV_NLV | 0 | 0 | 0 | 0 | 35 | CAAPRETSYDKVI | | | | | 1794 |
| | Nonnaive | | | | | | | F | | | | | |
| TB7 | Foreign_ | CMV_NLV | 0 | 0 | 0 | 0 | 26-2 | CILSNNNDMRF | | | | | 1793 |
| | Nonnaive | | | | | | | | | | | | |
| TB8 | Foreign_ | EBV_YVL | 0 | 0 | 0 | 0 | 17 | CASSGLSSGGSY | | | 1-Mar | CASSPLRGPADR | 1727 |
| | Nonnaive | | | | | | | IPTF | | | | TGTEAFF | 1951 |
| TB9 | Foreign_ | CMV_NLV | 0 | 0 | 0 | 0 | 35 | CAAPRETSYDKVI | | | 12-3, | CASSSANYGYTF | 1794 |
| | Nonnaive | | | | | | | F | | | 12-4 | | 1968 |
| TC7 | Foreign_ | CMV_NLV | 0 | 0 | 0 | 0 | 26-2 | CILSNNNDMRF | | | | | 1793 |
| | Nonnaive | | | | | | | | | | | | |
| TC8 | Foreign_ | CMV_NLV | 0 | 0 | 0 | 0 | | | | | | | |
| | Nonnaive | | | | | | | | | | | | |
| TC9 | Foreign_ | EBV_YVL | 0 | 0 | 0 | 0 | 17 | CASSGLSSGGSY | | | 1-Mar | CASSPLRGPADR | 1727 |
| | Nonnaive | | | | | | | IPTF | | | | TGTEAFF | 1951 |
| TD7 | Foreign_ | CMV_NLV | 0 | 0 | 0 | 0 | 35 | CAGPTKTSYDKVI | | | 12-3, | CASSSANYGYTF | 1795 |
| | Nonnaive | | | | | | | F | | | 12-4 | | 1968 |
| TD8 | Foreign_ | EBV_YVL | 0 | 0 | 0 | 0 | 17 | CASSGLSSGGSY | | | 1-Mar | CASSPLRGPADR | 1727 |
| | Nonnaive | | | | | | | IPTF | | | | TGTEAFF | 1951 |
| TD9 | Foreign_ | CMV_NLV | 0 | 0 | 0 | 0 | 35 | CAAPRETSYDKVI | | | 12-3, | CASSSANYGYTF | 1794 |
| | Nonnaive | | | | | | | F | | | 12-4 | | 1968 |
| TE7 | Foreign_ | CMV_NLV | 0 | 0 | 0 | 0 | 35 | CAAPRETSYDKVI | | | 12-3, | CASSSANYGYTF | 1794 |
| | Nonnaive | | | | | | | F | | | 12-4 | | 1968 |
| TE8 | Foreign_ | CMV_NLV | 0 | 0 | 0 | 0 | 35 | CAGPTKTSYDKVI | | | 12-3, | CASSSANYGYTF | 1795 |
| | Nonnaive | | | | | | | F | | | 12-4 | | 1968 |
| TE9 | Foreign_ | EBV_YVL | 0 | 0 | 0 | 0 | 17 | CATGLNYGGSQ | | | 2-Oct | CASSLFNQETQY | 1796 |
| | Nonnaive | | | | | | | GNLIF | | | | F | 1969 |
| TF7 | Foreign_ | CMV_NLV | 0 | 0 | 0 | 0 | 26-2 | CILSNNNDMRF | | | 30 | CAWSISDSSRVE | 1793 |
| | Nonnaive | | | | | | | | | | | AFF | 1967 |
| TF8 | Foreign_ | CMV_NLV | 0 | 0 | 0 | 0 | 3 | CAVFYGNKLVF | | | 5-Jun | CASSYATGIPDTQ | 1797 |
| | Nonnaive | | | | | | | | | | | YF | 1970 |
| TF9 | Foreign_ | EBV_YVL | 0 | 0 | 0 | 0 | 17 | CASSGLSSGGSY | | | 1-Mar | CASSPLRGPADR | 1727 |
| | Nonnaive | | | | | | | IPTF | | | | TGTEAFF | 1951 |
| TG7 | Foreign_ | CMV_NLV | 0 | 0 | 0 | 0 | 35 | CAAPRETSYDKVI | | | 12-3, | CASSSANYGYTF | 1794 |
| | Nonnaive | | | | | | | F | | | 12-4 | | 1968 |
| TG8 | Foreign_ | EBV_YVL | 0 | 0 | 0 | 0 | 17 | CASSGLSSGGSY | | | 1-Mar | CASSPLRGPADR | 1727 |
| | Nonnaive | | | | | | | IPTF | | | | TGTEAFF | 1951 |
| TG9 | Foreign_ | CMV_NLV | 0 | 0 | 0 | 0 | 26-2 | CILSNNNDMRF | | | 30 | CAWSISDSSRVE | 1793 |
| | Nonnaive | | | | | | | | | | | AFF | 1967 |
| TH7 | Foreign_ | 0 | 0 | 0 | 0 | 0 | | | | | | | |
| | Nonnaive | | | | | | | | | | | | |
| TH8 | Foreign_ | CMV_NLV | 0 | 0 | 0 | 0 | | | | | | | |
| | Nonnaive | | | | | | | | | | | | |
| TH9 | Foreign_ | EBV_YVL | 0 | 0 | 0 | 0 | | | | | | | |
| | Nonnaive | | | | | | | | | | | | |
| UA7 | Foreign_ | CMV_NLV | 0 | 0 | 0 | 0 | | | | | | | |
| | Nonnaive | | | | | | | | | | | | |
| UA8 | Foreign_ | CMV_NLV | 0 | 0 | 0 | 0 | 3 | CAVFYGNKLVF | | | 5-Jun | CASSYATGIPDTQ | 1797 |
| | Nonnaive | | | | | | | | | | | YF | 1970 |
| UA9 | Foreign_ | CMV_NLV | 0 | 0 | 0 | 0 | 35 | CAAPRETSYDKVI | | | 12-3, | CASSSANYGYTF | 1794 |
| | Nonnaive | | | | | | | F | | | 12-4 | | 1968 |
| UB7 | Foreign_ | CMV_NLV | 0 | 0 | 0 | 0 | 35 | CAAPRETSYDKVI | | | 12-3, | CASSSANYGYTF | 1794 |
| | Nonnaive | | | | | | | F | | | 12-4 | | 1968 |
| UB8 | Foreign_ | CMV_NLV | 0 | 0 | 0 | 0 | 26-2 | CILSNNNDMRF | | | 30 | CAWSISDSSRVE | 1793 |
| | Nonnaive | | | | | | | | | | | AFF | 1767 |
| UB9 | Foreign_ | CMV_NLV | 0 | 0 | 0 | 0 | | | | | 12-3, | CASSSANYGYTF | 1968 |
| | Nonnaive | | | | | | | | | | 12-4 | | |
| UC7 | Foreign_ | EBV_YVL | 0 | 0 | 0 | 0 | | | | | 1-Mar | CASSPLRGPADR | 1951 |
| | Nonnaive | | | | | | | | | | | TGTEAFF | |
| UC8 | Foreign_ | CMV_NLV | 0 | 0 | 0 | 0 | | | | | | | |
| | Nonnaive | | | | | | | | | | | | |
| UC9 | Foreign_ | CMV_NLV | 0 | 0 | 0 | 0 | | | | | | | |
| | Nonnaive | | | | | | | | | | | | |
| UD7 | Foreign_ | CMV_NLV | 0 | 0 | 0 | 0 | 26-2 | CILSNNNDMRF | | | | | 1793 |
| | Nonnaive | | | | | | | | | | | | |
| UD8 | Foreign_ | CMV_NLV | 0 | 0 | 0 | 0 | | | | | | | |
| | Nonnaive | | | | | | | | | | | | |
| UD9 | Foreign_ | CMV_NLV | 0 | 0 | 0 | 0 | | | | | 12-3, | CASSSANYGYTF | 1968 |
| | Nonnaive | | | | | | | | | | 12-4 | | |
| UE7 | Foreign_ | CMV_NLV | 0 | 0 | 0 | 0 | 35 | CAAPRETSYDKVI | | | 12-3, | CASSSANYGYTF | 1794 |
| | Nonnaive | | | | | | | F | | | 12-4 | | 1968 |
| UE8 | Foreign_ | CMV_NLV | 0 | 0 | 0 | 0 | 3 | CAVFYGNKLVF | | | 5-Jun | CASSYATGIPDTQ | 1797 |
| | Nonnaive | | | | | | | | | | | YF | 1970 |
| UE9 | Foreign_ | CMV_NLV | 0 | 0 | 0 | 0 | 35 | CAAPRETSYDKVI | | | 12-3, | CASSSANYGYTF | 1794 |
| | Nonnaive | | | | | | | F | | | 12-4 | | 1968 |
| UF7 | Foreign_ | CMV_NLV | 0 | 0 | 0 | 0 | 35 | CAAPRETSYDKVI | | | 12-3, | CASSSANYGYTF | 1794 |
| | Nonnaive | | | | | | | F | | | 12-4 | | 1968 |
| UF8 | Foreign_ | CMV_NLV | 0 | 0 | 0 | 0 | 35 | CAAPRETSYDKVI | | | 12-3, | CASSSANYGYTF | 1794 |
| | Nonnaive | | | | | | | F | | | 12-4 | | 1968 |
| UF9 | Foreign_ | CMV_NLV | 0 | 0 | 0 | 0 | | | | | | | |
| | Nonnaive | | | | | | | | | | | | |
| UG7 | Foreign_ | 0 | 0 | 0 | 0 | 0 | 4-Aug | CAVSDLNYGQNF | | | 9-Jul | CASTYGGGALNE | 1798 |
| | Nonnaive | | | | | | | VF | | | | QFF | 1971 |
| UG8 | Foreign_ | CMV_NLV | 0 | 0 | 0 | 0 | 35 | CAAPRETSYDKVI | | | 12-3, | CASSSANYGYTF | 1794 |
| | Nonnaive | | | | | | | F | | | 12-4 | | 1968 |
| UG9 | Foreign_ | CMV_NLV | 0 | 0 | 0 | 0 | 26-2 | CILSNNNDMRF | | | 30 | CAWSISDSSRVE | 1793 |
| | Nonnaive | | | | | | | | | | | AFF | 1967 |
| UH7 | Foreign_ | CMV_NLV | 0 | 0 | 0 | 0 | 26-2 | CILSNNNDMRF | | | | | 1793 |
| | Nonnaive | | | | | | | | | | | | |
| UH8 | Foreign_ | EBV_YVL | 0 | 0 | 0 | 0 | | | | | 1-Mar | CASSPLRGPADR | 1951 |
| | Nonnaive | | | | | | | | | | | TGTEAFF | |
| UH9 | Foreign_ | CMV_NLV | 0 | 0 | 0 | 0 | 3 | CAVFYGNKLVF | | | 5-Jun | CASSYATGIPDTQ | 1797 |
| | Nonnaive | | | | | | | | | | | YF | 1970 |
| VA7 | Foreign_ | CMV_NLV | 0 | 0 | 0 | 0 | 35 | CAAPRETSYDKVI | | | 12-3, | CASSSANYGYTF | 1794 |
| | Nonnaive | | | | | | | F | | | 12-4 | | 1968 |
| VA8 | Foreign_ | CMV_NLV | 0 | 0 | 0 | 0 | 35 | CAGPTKTSYDKVI | | | 12-3, | CASSSANYGYTF | 1795 |
| | Nonnaive | | | | | | | F | | | 12-4 | | 1968 |
| VA9 | Foreign_ | CMV_NLV | 0 | 0 | 0 | 0 | 35 | CAAPRETSYDKVI | | | 12-3, | CASSSANYGYTF | 1794 |
| | Nonnaive | | | | | | | F | | | 12-4 | | 1968 |
| VB7 | Foreign_ | CMV_NLV | 0 | 0 | 0 | 0 | 35 | CAAPRETSYDKVI | | | | | 1794 |
| | Nonnaive | | | | | | | F | | | | | |
| VB8 | Foreign_ | CMV_NLV | 0 | 0 | 0 | 0 | 26-2 | CILSNNNDMRF | | | 30 | CAWSISDSSRVE | 1793 |
| | Nonnaive | | | | | | | | | | | AFF | 1967 |
| VB9 | Foreign_ | CMV_NLV | 0 | 0 | 0 | 0 | 26-2 | CILSNNNDMRF | | | | | 1793 |
| | Nonnaive | | | | | | | | | | | | |
| VC7 | Foreign_ | CMV_NLV | 0 | 0 | 0 | 0 | 35 | CAAPRETSYDKVI | | | 12-3, | CASSSANYGYTF | 1794 |
| | Nonnaive | | | | | | | F | | | 12-4 | | 1968 |
| VC8 | Foreign_ | EBV_YVL | 0 | 0 | 0 | 0 | 17 | CASSGLSSGGSY | | | 1-Mar | CASSPLRGPADR | 1727 |
| | Nonnaive | | | | | | | IPTF | | | | TGTEAFF | 1951 |
| VC9 | Foreign_ | CMV_NLV | 0 | 0 | 0 | 0 | 35 | CAAPRETSYDKVI | | | 12-3, | CASSSANYGYTF | 1794 |
| | Nonnaive | | | | | | | F | | | 12-4 | | 1968 |
| VD7 | Foreign_ | CMV_NLV | 0 | 0 | 0 | 0 | | | | | 12-3, | CASSSANYGYTF | 1968 |
| | Nonnaive | | | | | | | | | | 12-4 | | |
| VD8 | Foreign_ | CMV_NLV | 0 | 0 | 0 | 0 | 35 | CAAPRETSYDKVI | | | 12-3, | CASSSANYGYTF | 1794 |
| | Nonnaive | | | | | | | F | | | 12-4 | | 1968 |
| VD9 | Foreign_ | CMV_NLV | 0 | 0 | 0 | 0 | | | | | | | |
| | Nonnaive | | | | | | | | | | | | |
| VE7 | Foreign_ | CMV_NLV | 0 | 0 | 0 | 0 | | | | | | | |
| | Nonnaive | | | | | | | | | | | | |
| VE8 | Foreign_ | CMV_NLV | 0 | 0 | 0 | 0 | 3 | CAVFYGNKLVF | | | 5-Jun | CASSYATGIPDTQ | 1797 |
| | Nonnaive | | | | | | | | | | | YF | 1970 |
| VE9 | Foreign_ | CMV_NLV | 0 | 0 | 0 | 0 | 35 | CAAPRETSYDKVI | | | | | 1794 |
| | Nonnaive | | | | | | | F | | | | | |
| VF7 | Foreign_ | CMV_NLV | 0 | 0 | 0 | 0 | 35 | CAAPRETSYDKVI | | | 12-3, | CASSSANYGYTF | 1794 |
| | Nonnaive | | | | | | | F | | | 12-4 | | 1968 |
| VF8 | Foreign_ | CMV_NLV | 0 | 0 | 0 | 0 | 26-2 | CILSNNNDMRF | | | 30 | CAWSISDSSRVE | 1793 |
| | Nonnaive | | | | | | | | | | | AFF | 1767 |
| VF9 | Foreign_ | CMV_NLV | 0 | 0 | 0 | 0 | 35 | CAAPRETSYDKVI | | | 12-3, | CASSSANYGYTF | 1794 |
| | Nonnaive | | | | | | | F | | | 12-4 | | 1968 |
| VG7 | Foreign_ | EBV_YVL | 0 | 0 | 0 | 0 | 17 | CASSGLSSGGSY | | | 1-Mar | CASSPLRGPADR | 1727 |
| | Nonnaive | | | | | | | IPTF | | | | TGTEAFF | 1951 |
| VG8 | Foreign_ | CMV_NLV | 0 | 0 | 0 | 0 | 24 | CARNTGNQFYF | | | | | 1734 |
| | Nonnaive | | | | | | | | | | | | |
| VG9 | Foreign_ | CMV_NLV | 0 | 0 | 0 | 0 | | | | | 12-3, | CASSSANYGYTF | 1968 |
| | Nonnaive | | | | | | | | | | 12-4 | | |
| VH7 | Foreign_ | CMV_NLV | 0 | 0 | 0 | 0 | 35 | CAGPTKTSYDKVI | | | | | 1795 |
| | Nonnaive | | | | | | | F | | | | | |
| VH8 | Foreign_ | CMV_NLV | 0 | 0 | 0 | 0 | | | | | 12-3, | CASSSANYGYTF | 1968 |
| | Nonnaive | | | | | | | | | | 12-4 | | |
| VH9 | Foreign_ | CMV_NLV | 0 | 0 | 0 | 0 | | | | | | | |
| | Nonnaive | | | | | | | | | | | | |
| WA7 | Foreign_ | CMV_NLV | 0 | 0 | 0 | 0 | 35 | CAAPRETSYDKVI | | | 12-3, | CASSSANYGYTF | 1794 |
| | Nonnaive | | | | | | | F | | | 12-4 | | 1968 |
| WA8 | Foreign_ | 0 | 0 | 0 | 0 | 0 | 17 | CASSGLSSGGSY | | | | | 1727 |
| | Nonnaive | | | | | | | IPTF | | | | | |
| WB7 | Foreign_ | CMV_NLV | 0 | 0 | 0 | 0 | 35 | CAAPRETSYDKVI | | | 12-3, | CASSSANYGYTF | 1794 |
| | Nonnaive | | | | | | | F | | | 12-4 | | 1968 |
| WB8 | Foreign_ | CMV_NLV | 0 | 0 | 0 | 0 | 26-2 | CILSNNNDMRF | | | | | 1793 |
| | Nonnaive | | | | | | | | | | | | |
| WC7 | Foreign_ | CMV_NLV | 0 | 0 | 0 | 0 | 35 | CAAPRETSYDKVI | | | 12-3, | CASSSANYGYTF | 1794 |
| | Nonnaive | | | | | | | F | | | 12-4 | | 1968 |
| WC8 | Foreign_ | CMV_NLV | 0 | 0 | 0 | 0 | 35 | CAAPRETSYDKVI | | | 12-3, | CASSSANYGYTF | 1794 |
| | Nonnaive | | | | | | | F | | | 12-4 | | 1968 |
| WD7 | Foreign_ | CMV_NLV | 0 | 0 | 0 | 0 | 35 | CAAPRETSYDKVI | | | 12-3, | CASSSANYGYTF | 1794 |
| | Nonnaive | | | | | | | F | | | 12-4 | | 1968 |
| WD8 | Foreign_ | CMV_NLV | 0 | 0 | 0 | 0 | | | | | 12-3, | CASSSANYGYTF | 1968 |
| | Nonnaive | | | | | | | | | | 12-4 | | |
| WE7 | Foreign_ | CMV_NLV | 0 | 0 | 0 | 0 | 35 | CAAPRETSYDKVI | | | 12-3, | CASSSANYGYTF | 1794 |
| | Nonnaive | | | | | | | F | | | 12-4 | | 1968 |
| WE8 | Foreign_ | CMV_NLV | 0 | 0 | 0 | 0 | 35 | CAAPRETSYDKVI | | | 12-3, | CASSSANYGYTF | 1794 |
| | Nonnaive | | | | | | | F | | | 12-4 | | 1968 |
| WF7 | Foreign_ | CMV_NLV | 0 | 0 | 0 | 0 | 35 | CAAPRETSYDKVI | | | 12-3, | CASSSANYGYTF | 1794 |
| | Nonnaive | | | | | | | F | | | 12-4 | | 1968 |
| WF8 | Foreign_ | CMV_NLV | 0 | 0 | 0 | 0 | 35 | CAAPRETSYDKVI | | | 12-3, | CASSSANYGYTF | 1794 |
| | Nonnaive | | | | | | | F | | | 12-4 | | 1968 |
| WG7 | Foreign_ | CMV_NLV | 0 | 0 | 0 | 0 | 26-2 | CILSNNNDMRF | | | 30 | CAWSISDSSRVE | 1793 |
| | Nonnaive | | | | | | | | | | | AFF | 1967 |
| WG8 | Foreign_ | CMV_NLV | 0 | 0 | 0 | 0 | 35 | CAAPRETSYDKVI | | | 12-3, | CASSSANYGYTF | 1794 |
| | Nonnaive | | | | | | | F | | | 12-4 | | 1968 |
| WH7 | Foreign_ | CMV_NLV | 0 | 0 | 0 | 0 | 3 | CAVFYGNKLVF | | | 5-Jun | CASSYATGIPDTQ | 1797 |
| | Nonnaive | | | | | | | | | | | YF | 1970 |
| WH8 | Foreign_ | 0 | 0 | 0 | 0 | 0 | | | | | | | |
| | Nonnaive | | | | | | | | | | | | |
| TA4 | Self_Naive | TYR_YMD | 0 | 0 | 0 | 0 | 2-Dec | CAVNMFSNYGQ | | | | | 1799 |
| | | | | | | | | NFVF | | | | | |
| TA5 | Self_Naive | DRIP_MLY | 0 | 0 | 0 | 0 | 2-Sep | CALRIGGSTLGRL | | | 12-3, | CASSASGGRDYG | 1800 |
| | | | | | | | | YF | | | 12-4 | YTF | 1972 |
| TA6 | Self_Naive | DRIP_MLY | 0 | 0 | 0 | 0 | 1-Dec | CVVNLPNTGFQK | | | 12-3, | CASRTGTSGGFP | 1801 |
| | | | | | | | | LVF | | | 12-4 | NTGELFF | 1973 |
| TB4 | Self_Naive | MART1_A2L | 0 | 0 | 0 | 0 | 2-Dec | CAVNVANDMRF | | | 5-Jun | CASSYSIGNTEAF | 1802 |
| | | | | | | | | | | | | F | 1974 |
| TB5 | Self_Naive | MART1_A2L | 0 | 0 | 0 | 0 | 2-Dec | CAVNGGGKLTF | 16 | CAPTIYNQGGKLI | 24-1 | CATSGSYEQYF | 1803 |
| | | | | | | | | | | F | | | 1886 |
| | | | | | | | | | | | | | 1975 |
| TB6 | Self_Naive | PP1_SII | 0 | 0 | 0 | 0 | 2-Sep | CALPNFGNEKLT | | | 5-Jun | CASSYRFDSPLHF | 1804 |
| | | | | | | | | F | | | | | 1976 |
| TC4 | Self_Naive | ZNT8_LLI | 0 | 0 | 0 | 0 | 16 | CALSGSDSWGKL | | | 1-Oct | CASSESTIVQGYN | 1805 |
| | | | | | | | | QF | | | | EQFF | 1977 |
| TC5 | Self_Naive | MART1_A2L | 0 | 0 | 0 | 0 | 2-Dec | CAADNYGQNFVF | | | 30 | CAWSVSGLGYGY | 1806 |
| | | | | | | | | | | | | TF | 1978 |
| TC6 | Self_Naive | DRIP_MLY | 0 | 0 | 0 | 0 | 19 | CALSENTGFQKL | | | | | |
| | | | | | | | | VF | | | | | 1807 |
| TD4 | Self_Naive | MART1_A2L | 0 | 0 | 0 | 0 | 2-Dec | CAAPGNTPLVF | | | 3-Oct | CAISETTGINEQFF | 1808 |
| | | | | | | | | | | | | | 1979 |
| TD5 | Self_Naive | ZNT8_VVT | 0 | 0 | 0 | 0 | 38- | | | | 30 | CAWSGFSRTEAF | 1809 |
| | | | | | | | 2/DV8 | CAYRSVPDMRF | | | | F | 1980 |
| TD6 | Self_Naive | TYR_YMD | 0 | 0 | 0 | 0 | 1-Dec | CVVNFPTNAGKS | | | 14 | CASSLGQGLSYE | 1810 |
| | | | | | | | | TF | | | | QYF | 1981 |
| TE4 | Self_Naive | IGRP_FLW | 0 | 0 | 0 | 0 | 38- | CAYRSALWGAQ | | | 2-Jul | CASSLAENSGNTI | 1811 |
| | | | | | | | 2/DV8 | KLVF | | | | YF | 1982 |
| TE5 | Self_Naive | MART1_A2L | 0 | 0 | 0 | 0 | | | | | | | |
| TE6 | Self_Naive | MART1_A2L | 0 | 0 | 0 | 0 | 2-Dec | CAVKDARLMF | | | | | 1812 |
| TF4 | Self_Naive | ZNT8_VVT | 0 | 0 | 0 | 0 | 38- | CSLANAGKSTF | | | 2-Nov | CASSLVGGITGEL | 1813 |
| | | | | | | | 2/DV8 | | | | | FF | 1983 |
| TF5 | Self_Naive | ZNT8_VVT | 0 | 0 | 0 | 0 | 3-Dec | CAMSDTNAGKST | | | 27 | CASSTSAGFSNQ | 1814 |
| | | | | | | | | F | | | | PQHF | 1984 |
| TF6 | Self_Naive | 0 | 0 | 0 | 0 | 0 | 24 | CAPDQTGANNLF | | | | | 1815 |
| | | | | | | | | F | | | | | |
| TG4 | Self_Naive | MART1_A2L | 0 | 0 | 0 | 0 | 27 | CAGLNNARLMF | | | 2-Apr | CASSLQGGYGGG | 1816 |
| | | | | | | | | | | | | YTF | 1985 |
| TG5 | Self_Naive | MART1_A2L | 0 | 0 | 0 | 0 | 3-Dec | CAMTLSNFGNEK | | | 4-Jun | CASSDMAGDGYT | 1817 |
| | | | | | | | | LTF | | | | F | 1986 |
| TG6 | Self_Naive | AGL_GLI | 0 | 0 | 0 | 0 | 2-Dec | CAVGEYGNKLVF | | | 4-May | CASSPGPYEQYF | 1818 |
| | | | | | | | | | | | | | 1987 |
| TH4 | Self_Naive | MART1_A2L | 0 | 0 | 0 | 0 | 20 | CAVQTQGGSEKL | | | | | |
| | | | | | | | | VF | | | | | 1819 |
| TH5 | Self_Naive | MART1_A2L | IV_AIM | 0 | 0 | 0 | 20 | CAARGRDDKIIF | | | | | 1820 |
| TH6 | Self_Naive | MART1_A2L | 0 | 0 | 0 | 0 | 3-Aug | CAAFTSGNTPLV | | | 2-Nov | CASSLGGLGQPQ | 1821 |
| | | | | | | | | F | | | | HF | 1988 |
| UA4 | Self_Naive | GP100_YLE | 0 | 0 | 0 | 0 | | | | | 6-2, 6-3 | CASSWAPHYEQY | 1989 |
| | | | | | | | | | | | | F | |
| UA5 | Self_Naive | ZNT8_VVT | 0 | 0 | 0 | 0 | 2-Dec | CVFPNQGGSEKL | | | 1-Mar | CASSQDPGNGNT | 1822 |
| | | | | | | | | VF | | | | IYF | 1990 |
| UA6 | Self_Naive | 0 | 0 | 0 | 0 | 0 | 4-Aug | CAVSVITQGGSE | | | 3-Oct | CASSAGRYEQYF | 1823 |
| | | | | | | | | KLVF | | | | | 1991 |
| UB4 | Self_Naive | MART1_A2L | 0 | 0 | 0 | 0 | | | | | 27 | CASSVGGFGNQP | 1992 |
| | | | | | | | | | | | | QHF | |
| UB5 | Self_Naive | GP100_IMD | 0 | 0 | 0 | 0 | | | | | 15 | CATSTGWRTGTD | 1993 |
| | | | | | | | | | | | | TQYF | |
| UB6 | Self_Naive | MART1_A2L | IGRP_RLL | PPI_RLL | 0 | 0 | 2-Dec | CAVSSYDKVIF | | | 20-1 | CSALTGNQPQHF | 1824 |
| | | | | | | | | | | | | | 1994 |
| UC4 | Self_Naive | NYESO1_ | NYESO1_ | 0 | 0 | 0 | 38- | CALMDSNYQLIW | | | | | 1825 |
| | | 9A | V165 | | | | 2/DV8 | | | | | | |
| UC5 | Self_Naive | ZNT8_VMI | 0 | 0 | 0 | 0 | 2-Dec | CAVSGYSTLTF | | | 29-1 | CSVGLGQTGTEA | 1826 |
| | | | | | | | | | | | | FF | 1995 |
| UC6 | Self_Naive | MART1_A2L | 0 | 0 | 0 | 0 | 27 | CAGSGGGYQKV | 25 | CAGYKLVF | 5-Jun | CASSYSQGVYTG | 1827 |
| | | | | | | | | TF | | | | ELFF | 1887 |
| | | | | | | | | | | | | | 1996 |
| UD4 | Self_Naive | DDX5_YLL | 0 | 0 | 0 | 0 | | | | | 6-Jun | CASSWDYTEQYF | 1997 |
| UD5 | Self_Naive | ZNT8_LLS | 0 | 0 | 0 | 0 | 2-Dec | | | | 24-1 | CATSDSTGSYGY | 1828 |
| | | | | | | | | CAADSWGKLQF | | | | TF | 1998 |
| UD6 | Self_Naive | MART1_A2L | 0 | 0 | 0 | 0 | | | | | 5-Jun | CASLQGSGSPLH | 1999 |
| | | | | | | | | | | | | F | |
| UE4 | Self_Naive | 0 | 0 | 0 | 0 | 0 | | | | | 4-Jun | CASSVGGLGQPQ | 2000 |
| | | | | | | | | | | | | HF | |
| UE5 | Self_Naive | MART1_A2L | 0 | 0 | 0 | 0 | 2-Dec | CAAPSGNTPLVF | | | 19 | CASSMAGEQYF | 1829 |
| | | | | | | | | | | | | | 2001 |
| UE6 | Self_Naive | PP1_SII | 0 | 0 | 0 | 0 | 17 | CATDGEDDSWG | | | 4-May | CASVLGGSSYNE | 1830 |
| | | | | | | | | KLQF | | | | QFF | 2002 |
| UF4 | Self_Naive | MART1_A2L | 0 | 0 | 0 | 0 | 2-Dec | CAVGGGSQGNLI | | | 1-Mar | CASSPYRTGNIQY | 1831 |
| | | | | | | | | F | | | | F | 2003 |
| UF5 | Self_Naive | ZNT8_LLS | 0 | 0 | 0 | 0 | 2-Dec | CAVNPSNQFYF | | | 2 | CASRGPYHNEQF | 1832 |
| | | | | | | | | | | | | F | 2004 |
| UF6 | Self_Naive | MART1_A2L | 0 | 0 | 0 | 0 | 2-Dec | CAVNLNQAGTALI | | | 2-Apr | CASSQVGSTEAF | 1833 |
| | | | | | | | | F | | | | F | 2005 |
| UG4 | Self_Naive | MAGEA10_ | 0 | 0 | 0 | 0 | 17 | CATDEVDSSYKLI | | | 2 | | 1834 |
| | | GLY | | | | | | F | | | | CASTSYTEAFF | 2006 |
| UG5 | Self_Naive | MART1_A2L | 0 | 0 | 0 | 0 | 3-Dec | CAMSQSNFGNE | | | 18 | CASSPGQSPTNE | 1835 |
| | | | | | | | | KLTF | | | | KLFF | 2007 |
| UG6 | Self_Naive | TYR_YMD | 0 | 0 | 0 | 0 | 17 | CATGFSGAGSYQ | 41 | CAVEGSRLTF | 9-Jul | CASSLVMDNYGY | 1836 |
| | | | | | | | | LTF | | | | TF | 1863 |
| | | | | | | | | | | | | | 2008 |
| UH4 | Self_Naive | ZNT8_VVT | 0 | 0 | 0 | 0 | 3-Dec | CAMSDGGFQKLV | | | | | |
| | | | | | | | | F | | | | | 1837 |
| UH5 | Self_Naive | MART1_A2L | 0 | 0 | 0 | 0 | 2-Dec | | | | 27 | CASSSPGGETQY | 1838 |
| | | | | | | | | CAVNTGFQKLVF | | | | F | 2009 |
| UH6 | Self_Naive | MART1_A2L | 0 | 0 | 0 | 0 | 2-Dec | CAVNRDNFNKFY | | | 9-Jul | CASSPEPGSHEQ | 1839 |
| | | | | | | | | F | | | | YF | 2010 |
| VA4 | Self_Naive | MART1_A2L | 0 | 0 | 0 | 0 | 2-Dec | CAVNNNDMRF | | | | | 1840 |
| VA5 | Self_Naive | GP100_IMD | 0 | 0 | 0 | 0 | 3 | CAVRYSSASKIIF | | | 27 | CASRPGGGGYTF | 1841 |
| | | | | | | | | | | | | | 2011 |
| VA6 | Self_Naive | MART1_A2L | 0 | 0 | 0 | 0 | 2-Dec | CAAFSGGGADGL | | | 5-Jun | CASMRGAHTGEL | 1842 |
| | | | | | | | | TF | | | | FF | 2012 |
| VB4 | Self_Naive | MART1_A2L | 0 | 0 | 0 | 0 | | | | | | | |
| | | | | | | | | | | | 20-1 | CSASTGLTEAFF | 2013 |
| VB5 | Self_Naive | MART1_A2L | 0 | 0 | 0 | 0 | 2-Dec | CAVGGGYQKVTF | | | | | 1843 |
| VB6 | Self_Naive | MART1_A2L | 0 | 0 | 0 | 0 | | | | | 2-Nov | CASSLVRDLLFTD | 2014 |
| | | | | | | | | | | | | TQYF | |
| VC4 | Self_Naive | DRIP_MLY | 0 | 0 | 0 | 0 | 3-Dec | CAMSVGGLTGG | | | 12-3, | CASSLSGQGATN | 1844 |
| | | | | | | | | GNKLTF | | | 12-4 | EKLFF | 2015 |
| VC5 | Self_Naive | MART1_A2L | 0 | 0 | 0 | 0 | 2-Dec | CAVANAGNMLTF | | | 2-Apr | CASSQEVGLAGE | 1845 |
| | | | | | | | | | | | | TQYF | 2016 |
| VC6 | Self_Naive | MART1_A2L | 0 | 0 | 0 | 0 | 2-Dec | CAVNTGGGADGL | | | 28 | CASTQGDTGELF | 1846 |
| | | | | | | | | TF | | | | F | 2017 |
| VD4 | Self_Naive | DRIP_MLY | 0 | 0 | 0 | 0 | | | | | 12-3, | CASSSDRAGSPL | 2018 |
| | | | | | | | | | | | 12-4 | HF | |
| VD5 | Self_Naive | GFAP_NLA | GPC_FVG | 0 | 0 | 0 | 2-Jan | CAAYNAGNMLTF | | | 5-May | CASSHRGSGNTIY | 1847 |
| | | | | | | | | | | | | F | 2019 |
| VD6 | Self_Naive | HCHGA_TLS | | 0 | 0 | 0 | | | | | 1-May | CASSLADVGQYD | 2020 |
| | | | 0 | | | | | | | | | TDTQYF | |
| VE4 | Self_Naive | NYESO1_ | NYESO1_ | 0 | 0 | 0 | | | | | 2 | CASSGPARDTQY | 2021 |
| | | 9A | V165 | | | | | | | | | F | |
| VE5 | Self_Naive | MAGEC2_ | 0 | 0 | 0 | 0 | 2-Sep | CALSLAEGNFNK | | | 1-Jun | CASTWTGEQYF | 1848 |
| | | LLF | | | | | | FYF | | | | | 2022 |
| VE6 | Self_Naive | GP100_YLE | 0 | 0 | 0 | 0 | 17 | CAPGIAGGTSYG | | | 27 | CASSLAYSYEQYF | 1849 |
| | | | | | | | | KLTF | | | | | 2023 |
| VF4 | Self_Naive | MART1_A2L | 0 | 0 | 0 | 0 | | | | | 5-Jun | CASSYETGGSYE | 2024 |
| | | | | | | | | | | | | QYF | |
| VF5 | Self_Naive | MART1_A2L | 0 | 0 | 0 | 0 | 2-Dec | CAVPTFVNTGKLI | | | 28 | CASTYGGLNEQY | 1850 |
| | | | | | | | | F | | | | F | 2025 |
| VF6 | Self_Naive | GP100_IMD | GP100_ITD | 0 | 0 | 0 | 20 | CAVGRDGNQFYF | | | 19 | CASSTTGGGNYE | 1851 |
| | | | | | | | | | | | | QYF | 2026 |
| VG4 | Self_Naive | IGRP_VLF | 0 | 0 | 0 | 0 | 1-Aug | CAVNGDSGGSN | | | 1-Nov | CASSLWGAGELF | 1852 |
| | | | | | | | | YKLTF | | | | F | 2027 |
| VG5 | Self_Naive | MART1_A2L | 0 | 0 | 0 | 0 | 2 | CASNGGSYEQYF | | | | | 2028 |
| VG6 | Self_Naive | CD1_LLG | 0 | 0 | 0 | 0 | | | | | 27 | CASSLGDTEQFF | 2029 |
| VH4 | Self_Naive | ZNT8_LLS | 0 | 0 | 0 | 0 | 1-Dec | CVVSEEYTNAGK | | | 6-May | CASSLERLRVYS | 1853 |
| | | | | | | | | STF | | | | GYTF | 2030 |
| VH5 | Self_Naive | GP100_IMD | GP100_ | 0 | 0 | 0 | 14/DV4 | CAMREGTGRRAL | | | 2 | CATHGVSSRETQ | 1854 |
| | | | ITD | | | | | TF | | | | YF | 2031 |
| VH6 | Self_Naive | PP1_SII | 0 | 0 | 0 | 0 | 39 | CAGGGSQGNLIF | | | | | 1855 |
| WA4 | Self_Naive | HCHGA_TLS | 0 | 0 | 0 | 0 | | | | | | | |
| WA5 | Self_Naive | MART1_A2L | 0 | 0 | 0 | 0 | 2-Dec | CAVPTNFGNEKL | | | 6-May | CASSLEGTGLTDT | 1856 |
| | | | | | | | | TF | | | | QYF | 2032 |
| WA6 | Self_Naive | MART1_A2L | 0 | 0 | 0 | 0 | 2-Dec | CASTGGKLIF | | | 27 | CASSLSTVFTDTQ | 1857 |
| | | | | | | | | | | | | YF | 2033 |
| WB4 | Self_Naive | DRIP_MLY | 0 | 0 | 0 | 0 | 24 | CAVSSGTYKYIF | | | 12-3, | CASSLLGNTEAFF | 1858 |
| | | | | | | | | | | | 12-4 | | 2034 |
| WB5 | Self_Naive | GP100_IMD | GP100_ | 0 | 0 | 0 | 3 | CAVRDDTGGFKT | 8-3 | CAGGPYNTDKLIF | 19 | CASSTTEAYEQYF | 1859 |
| | | | ITD | | | | | IF | | | | | 1888 |
| | | | | | | | | | | | | | 2035 |
| WB6 | Self_Naive | GP100_IMD | GP100_ | 0 | 0 | 0 | 24 | CAFGDNYGQNFV | | | 19 | CASSTALAASYEQ | 1860 |
| | | | ITD | | | | | F | | | | YF | 2036 |
| WC4 | Self_Naive | MART1_A2L | 0 | 0 | 0 | 0 | | | | | 13 | CASSLGVGQPQH | 2037 |
| | | | | | | | | | | | | F | |
| WC5 | Self_Naive | GP100_IMD | GP100_ | 0 | 0 | 0 | 35 | CAGLADSNYQLI | | | 9 | CASSVGSGGRPS | 1861 |
| | | | ITD | | | | | W | | | | SYNEQFF | 2038 |
| WC6 | Self_Naive | ZNT8_LLS | 0 | 0 | 0 | 0 | 3-Dec | CAMDSSYKLIF | 26-1 | CIVRVECMYSGG | 9 | CASSALAGGQAD | #N/A |
| | | | | | | | | | | GADGLTF | | TQYF | |
| WD4 | Self_Naive | MART1_A2L | 0 | 0 | 0 | 0 | 41 | CAVEGSRLTF | | | 2-Nov | CASSSGPTMGGK | 1863 |
| | | | | | | | | | | | | LFF | 2040 |
| WD5 | Self_Naive | MART1_A2L | 0 | 0 | 0 | 0 | 2-Dec | CAVNPTGYSTLT | | | 2 | CASNSGGYNEQF | 1864 |
| | | | | | | | | F | | | | F | 2041 |
| WD6 | Self_Naive | MART1_A2L | 0 | 0 | 0 | 0 | 2-Dec | CALPKGGYSTLT | | | 5-Jun | CASSTTGTGLLEQ | 1865 |
| | | | | | | | | F | | | | YF | 2042 |
| WE4 | Self_Naive | 0 | 0 | 0 | 0 | 0 | 17 | CALNFGNEKLTF | | | 27 | CASSSGPRGNEQ | 1866 |
| | | | | | | | | | | | | FF | 2043 |
| WE5 | Self_Naive | MART1_A2L | 0 | 0 | 0 | 0 | 2-Dec | CAALTGNQFYF | | | 14 | CASSQGSGQPQH | 1867 |
| | | | | | | | | | | | | F | 2044 |
| WE6 | Self_Naive | MART1_A2L | 0 | 0 | 0 | 0 | 1-Dec | CVVNPFGNEKLT | | | 20-1 | CSARHPGVSTDT | 1868 |
| | | | | | | | | F | | | | QYF | 2045 |
| WF4 | Self_Naive | PP1_SII | 0 | 0 | 0 | 0 | 27 | CAGVPSNTGKLIF | | | 1-May | CASSPWRGPFQE | 1869 |
| | | | | | | | | | | | | TQYF | 2046 |
| WF5 | Self_Naive | DRIP_MLY | 0 | 0 | 0 | 0 | | | | | | | |
| WF6 | Self_Naive | SNPG_IML | 0 | 0 | 0 | 0 | | | | | 6-May | CASSPGKTEAFF | 2047 |
| WG4 | Self_Naive | SNPG_IML | 0 | 0 | 0 | 0 | | | | | 2-Oct | CASSESGRAEAF | 2048 |
| | | | | | | | | | | | | F | |
| WG5 | Self_Naive | MART1_A2L | 0 | 0 | 0 | 0 | 2-Dec | CAASLGGGADGL | | | 9-Jul | CASSPDVGHEKL | 1870 |
| | | | | | | | | TF | | | | FF | 2049 |
| WG6 | Self_Naive | MART1_A2L | 0 | 0 | 0 | 0 | 2-Dec | CALAIGFGNVLHC | | | 27 | CASSPIGGGSNE | 1871 |
| | | | | | | | | | | | | QFF | 2050 |
| WH4 | Self_Naive | GP100_IMD | GP100_ | 0 | 0 | 0 | 3 | CAVSFGSSNTGK | | | 5-Dec | CASGFTFQGSPE | 1872 |
| | | | ITD | | | | | LIF | | | | AFF | 2051 |
| WH5 | Self_Naive | MART1_A2L | 0 | 0 | 0 | 0 | | | | | | | |
| WH6 | Self_Naive | MART1_A2L | 0 | 0 | 0 | 0 | 2-Dec | CAASGGGADGLT | | | 28 | CASSFGGLARNE | 1873 |
| | | | | | | | | F | | | | QFF | 2052 |
| TA10 | Self_ | MART1_A2L | 0 | 0 | 0 | 0 | 14/DV4 | CAMREGTGRRAL | | | 6-2, 6-3 | CASSYFGGSLSE | 1854 |
| | Nonnaive | | | | | | | TF | | | | QYF | 2053 |
| TA11 | Self_ | MART1_A2L | 0 | 0 | 0 | 0 | 14/DV4 | CAMREGTGRRAL | | | 6-2, 6-3 | CASSYFGGSLSE | 1854 |
| | Nonnaive | | | | | | | TF | | | | QYF | 2053 |
| TA12 | Self_ | MART1_A2L | 0 | 0 | 0 | 0 | | | | | 6-2, 6-3 | CASSYFGGSLSE | 2053 |
| | Nonnaive | | | | | | | | | | | QYF | |
| TB10 | Self_ | MART1_A2L | 0 | 0 | 0 | 0 | 14/DV4 | CAMREGTGRRAL | | | 6-2, 6-3 | CASSYFGGSLSE | 1854 |
| | Nonnaive | | | | | | | TF | | | | QYF | 2053 |
| TB11 | Self_ | MART1_A2L | 0 | 0 | 0 | 0 | 14/DV4 | CAMREGTGRRAL | | | 6-2, 6-3 | CASSYFGGSLSE | 1854 |
| | Nonnaive | | | | | | | TF | | | | QYF | 2053 |
| TB12 | Self_ | 0 | 0 | 0 | 0 | 0 | 14/DV4 | CAMREGTGRRAL | | | 6-2, 6-3 | CASSYFGGSLSE | 1854 |
| | Nonnaive | | | | | | | TF | | | | QYF | 2053 |
| TC10 | Self_ | MART1_A2L | 0 | 0 | 0 | 0 | 14/DV4 | CAMREGTGRRAL | | | 6-2, 6-3 | CASSYFGGSLSE | 1854 |
| | Nonnaive | | | | | | | TF | | | | QYF | 2053 |
| TC11 | Self_ | CD1_LLG | 0 | 0 | 0 | 0 | | | | | 27 | CASSFLTGTGELF | 2054 |
| | Nonnaive | | | | | | | | | | | F | |
| TC12 | Self_ | MART1_A2L | ADI_SVA | 0 | 0 | 0 | 14/DV4 | CAMREGTGRRAL | | | 6-2, 6-3 | CASSYFGGSLSE | 1854 |
| | Nonnaive | | | | | | | TF | | | | QYF | 2053 |
| TD10 | Self_ | MART1_A2L | 0 | 0 | 0 | 0 | 14/DV4 | CAMREGTGRRAL | | | 6-2, 6-3 | CASSYFGGSLSE | 1854 |
| | Nonnaive | | | | | | | TF | | | | QYF | 2053 |
| TD11 | Self_ | MART1_A2L | ADI_SVA | 0 | 0 | 0 | 14/DV4 | CAMREGTGRRAL | | | 6-2, 6-3 | CASSYFGGSLSE | 1854 |
| | Nonnaive | | | | | | | TF | | | | QYF | 2053 |
| TD12 | Self_ | MART1_A2L | 0 | 0 | 0 | 0 | | | | | | | |
| | Nonnaive | | | | | | | | | | | | |
| TE10 | Self_ | DRIP_MLY | 0 | 0 | 0 | 0 | | | | | | | |
| | Nonnaive | | | | | | | | | | | | |
| TE11 | Self_ | MART1_A2L | 0 | 0 | 0 | 0 | 14/DV4 | CAMREGTGRRAL | | | 6-2, 6-3 | CASSYFGGSLSE | 1854 |
| | Nonnaive | | | | | | | TF | | | | QYF | 2053 |
| TE12 | Self_ | MART1_A2L | 0 | 0 | 0 | 0 | 14/DV4 | CAMREGTGRRAL | | | 6-2, 6-3 | CASSYFGGSLSE | 1854 |
| | Nonnaive | | | | | | | TF | | | | QYF | 2053 |
| TF10 | Self_ | MART1_A2L | 0 | 0 | 0 | 0 | 14/DV4 | CAMREGTGRRAL | | | 6-2, 6-3 | CASSYFGGSLSE | 1854 |
| | Nonnaive | | | | | | | TF | | | | QYF | 2053 |
| TF11 | Self_ | MART1_A2L | 0 | 0 | 0 | 0 | 14/DV4 | CAMREGTGRRAL | | | 6-2, 6-3 | CASSYFGGSLSE | 1854 |
| | Nonnaive | | | | | | | TF | | | | QYF | 2053 |
| TF12 | Self_ | MART1_A2L | 0 | 0 | 0 | 0 | 14/DV4 | CAMREGTGRRAL | | | 6-2, 6-3 | CASSYFGGSLSE | 1854 |
| | Nonnaive | | | | | | | TF | | | | QYF | 2053 |
| TG10 | Self_ | MART1_A2L | ADI_SVA | 0 | 0 | 0 | 14/DV4 | CAMREGTGRRAL | | | 6-2, 6-3 | CASSYFGGSLSE | 1854 |
| | Nonnaive | | | | | | | TF | | | | QYF | 2053 |
| TG11 | Self_ | MART1_A2L | 0 | 0 | 0 | 0 | 14/DV4 | CAMREGTGRRAL | | | | | 1854 |
| | Nonnaive | | | | | | | TF | | | | | |
| TG12 | Self_ | MART1_A2L | 0 | 0 | 0 | 0 | 12-2 | CAGNTGNQFYF | | | 28 | CASRPQGLGNTIY | 1874 |
| | Nonnaive | | | | | | | | | | | F | 2055 |
| TH10 | Self_ | MART1_A2L | 0 | 0 | 0 | 0 | 14/DV4 | CAMREGTGRRAL | | | 6-2, 6-3 | CASSYFGGSLSE | 1854 |
| | Nonnaive | | | | | | | TF | | | | QYF | 2053 |
| TH11 | Self_ | MART1_A2L | 0 | 0 | 0 | 0 | 14/DV4 | CAMREGTGRRAL | | | 6-2, 6-3 | CASSYFGGSLSE | 1854 |
| | Nonnaive | | | | | | | TF | | | | QYF | 2053 |
| TH12 | Self_ | 0 | 0 | 0 | 0 | 0 | 14/DV4 | CAMREGTGRRAL | | | | | 1854 |
| | Nonnaive | | | | | | | TF | | | | | |
| UA10 | Self_ | MART1_A2L | 0 | 0 | 0 | 0 | 14/DV4 | CAMREGTGRRAL | | | 6-2, 6-3 | CASSYFGGSLSE | 1854 |
| | Nonnaive | | | | | | | TF | | | | QYF | 2053 |
| UA11 | Self_ | MART1_A2L | ADI_SVA | PP1_SII | 0 | 0 | 14/DV4 | CAMREGTGRRAL | | | 6-2, 6-3 | CASSYFGGSLSE | 1854 |
| | Nonnaive | | | | | | | TF | | | | QYF | 2053 |
| UA12 | Self_ | MART1_A2L | 0 | 0 | 0 | 0 | 14/DV4 | CAMREGTGRRAL | | | 6-2, 6-3 | CASSYFGGSLSE | 1854 |
| | Nonnaive | | | | | | | TF | | | | QYF | 2053 |
| UB10 | Self_ | 0 | 0 | 0 | 0 | 0 | 14/DV4 | CAMREGTGRRAL | | | 6-2, 6-3 | CASSYFGGSLSE | 1854 |
| | Nonnaive | | | | | | | TF | | | | QYF | 2053 |
| UB11 | Self_ | MART1_A2L | 0 | 0 | 0 | 0 | 14/DV4 | CAMREGTGRRAL | | | 6-2, 6-3 | CASSYFGGSLSE | 1854 |
| | Nonnaive | | | | | | | TF | | | | QYF | 2053 |
| UB12 | Self_ | MART1_A2L | 0 | 0 | 0 | 0 | 14/DV4 | CAMREGTGRRAL | | | 6-2, 6-3 | CASSYFGGSLSE | 1854 |
| | Nonnaive | | | | | | | TF | | | | QYF | 2053 |
| UC10 | Self_ | MART1_A2L | ADI_SVA | 0 | 0 | 0 | 14/DV4 | CAMREGTGRRAL | | | 6-2, 6-3 | CASSYFGGSLSE | 1854 |
| | Nonnaive | | | | | | | TF | | | | QYF | 2053 |
| UC11 | Self_ | 0 | 0 | 0 | 0 | 0 | 14/DV4 | CAMREGTGRRAL | | | 6-2, 6-3 | CASSYFGGSLSE | 1854 |
| | Nonnaive | | | | | | | TF | | | | QYF | 2053 |
| UC12 | Self_ | MART1_A2L | 0 | 0 | 0 | 0 | 14/DV4 | CAMREGTGRRAL | | | 6-2, 6-3 | CASSYFGGSLSE | 1854 |
| | Nonnaive | | | | | | | TF | | | | QYF | 2053 |
| UD10 | Self_ | 0 | 0 | 0 | 0 | 0 | 14/DV4 | CAMREGTGRRAL | | | 6-2, 6-3 | CASSYFGGSLSE | 1854 |
| | Nonnaive | | | | | | | TF | | | | QYF | 2053 |
| UD11 | Self_ | MART1_A2L | 0 | 0 | 0 | 0 | 14/DV4 | CAMREGTGRRAL | | | 6-2, 6-3 | CASSYFGGSLSE | 1854 |
| | Nonnaive | | | | | | | TF | | | | QYF | 2053 |
| UD12 | Self_ | MART1_A2L | 0 | 0 | 0 | 0 | 14/DV4 | CAMREGTGRRAL | | | 6-2, 6-3 | CASSYFRGSLSE | 1854 |
| | Nonnaive | | | | | | | TF | | | | QYF | 2056 |
| UE10 | Self_ | MART1_A2L | ADI_SVA | 0 | 0 | 0 | 14/DV4 | CAMREGTGRRAL | | | 6-2, 6-3 | CASSYFGGSLSE | 1854 |
| | Nonnaive | | | | | | | TF | | | | QYF | 2053 |
| UE11 | Self_ | MART1_A2L | 0 | 0 | 0 | 0 | 14/DV4 | CAMREGTGRRAL | | | 6-2, 6-3 | CASSYFGGSLSE | 1854 |
| | Nonnaive | | | | | | | TF | | | | QYF | 2053 |
| UE12 | Self_ | MART1_ | 0 | 0 | 0 | 0 | 14/DV4 | CAMREGTGRRAL | | | 6-2, 6-3 | CASSYFGGSLSE | 1854 |
| | Nonnaive | A2L | | | | | | TF | | | | QYF | 2053 |
| UF10 | Self_ | MART1_A2L | ADI_SVA | 0 | 0 | 0 | | | | | 6-2, 6-3 | CASSYFGGSLSE | 2053 |
| | Nonnaive | | | | | | | | | | | QYF | |
| UF11 | Self_ | MART1_A2L | 0 | 0 | 0 | 0 | 14/DV4 | CAMREGTGRRAL | | | 6-2, 6-3 | CASSYFGGSLSE | 1854 |
| | Nonnaive | | | | | | | TF | | | | QYF | 2053 |
| UF12 | Self_ | MART1_A2L | ADI_SVA | 0 | 0 | 0 | 14/DV4 | CAMREGTGRRAL | | | 6-2, 6-3 | CASSYFGGSLSE | 1854 |
| | Nonnaive | | | | | | | TF | | | | QYF | 2053 |
| UG10 | Self_ | MART1_A2L | 0 | 0 | 0 | 0 | 14/DV4 | CAMREGTGRRAL | | | 6-2, 6-3 | CASSYFGGSLSE | 1854 |
| | Nonnaive | | | | | | | TF | | | | QYF | 2053 |
| UG11 | Self_ | 0 | 0 | 0 | 0 | 0 | 14/DV4 | CAMREGTGRRAL | | | 6-2, 6-3 | CASSYFGGSLSE | 1854 |
| | Nonnaive | | | | | | | TF | | | | QYF | 2053 |
| UG12 | Self_ | MART1_A2L | 0 | 0 | 0 | 0 | 14/DV4 | CAMREGTGRRAL | | | 6-2, 6-3 | CASSYFGGSLSE | 1854 |
| | Nonnaive | | | | | | | TF | | | | QYF | 2053 |
| UH10 | Self_ | MART1_A2L | 0 | 0 | 0 | 0 | 14/DV4 | CAMREGTGRRAL | | | 6-2, 6-3 | CASSYFGGSLSE | 1854 |
| | Nonnaive | | | | | | | TF | | | | QYF | 2053 |
| UH11 | Self_ | MART1_A2L | 0 | 0 | 0 | 0 | 14/DV4 | CAMREGTGRRAL | | | 6-2, 6-3 | CASSYFGGSLSE | 1854 |
| | Nonnaive | | | | | | | TF | | | | QYF | 2053 |
| UH12 | Self_ | 0 | 0 | 0 | 0 | 0 | 14/DV4 | CAMREGTGRRAL | | | 6-2, 6-3 | CASSYFGGSLSE | 1854 |
| | Nonnaive | | | | | | | TF | | | | QYF | 2053 |
| VA10 | Self_ | MART1_A2L | ADI_SVA | 0 | 0 | 0 | 14/DV4 | CAMREGTGRRAL | | | 6-2, 6-3 | CASSYFGGSLSE | 1854 |
| | Nonnaive | | | | | | | TF | | | | QYF | 2053 |
| VA11 | Self_ | MART1_A2L | ADI_SVA | 0 | 0 | 0 | 14/DV4 | CAMREGTGRRAL | | | 6-2, 6-3 | CASSYFGGSLSE | 1854 |
| | Nonnaive | | | | | | | TF | | | | QYF | 2053 |
| VA12 | Self_ | MART1_A2L | 0 | 0 | 0 | 0 | 14/DV4 | CAMREGTGRRAL | | | 6-2, 6-3 | CASSYFGGSLSE | 1854 |
| | Nonnaive | | | | | | | TF | | | | QYF | 2053 |
| VB10 | Self_ | MART1_A2L | ADI_SVA | 0 | 0 | 0 | 14/DV4 | CAMREGTGRRAL | | | 6-2, 6-3 | CASSYFGGSLSE | 1854 |
| | Nonnaive | | | | | | | TF | | | | QYF | 2053 |
| VB11 | Self_ | MART1_A2L | 0 | 0 | 0 | 0 | 14/DV4 | CAMREGTGRRAL | | | 6-2, 6-3 | CASSYFGGSLSE | 1854 |
| | Nonnaive | | | | | | | TF | | | | QYF | 2053 |
| VB12 | Self_ | MART1_A2L | 0 | 0 | 0 | 0 | 14/DV4 | CAMREGTGRRAL | | | 6-2, 6-3 | CASSYFGGSLSE | 1854 |
| | Nonnaive | | | | | | | TF | | | | QYF | 2053 |
| VC10 | Self_ | MART1_A2L | ADI_SVA | 0 | 0 | 0 | 14/DV4 | CAMREGTGRRAL | | | 6-2, 6-3 | CASSYFGGSLSE | 1854 |
| | Nonnaive | | | | | | | TF | | | | QYF | 2053 |
| VC11 | Self_ | 0 | 0 | 0 | 0 | 0 | 14/DV4 | CAMREGTGRRAL | | | 6-2, 6-3 | CASSYFGGSLSE | 1854 |
| | Nonnaive | | | | | | | TF | | | | QYF | 2053 |
| VC12 | Self_ | MART1_A2L | 0 | 0 | 0 | 0 | 14/DV4 | CAMREGTGRRAL | | | 6-2, 6-3 | CASSYFGGSLSE | 1854 |
| | Nonnaive | | | | | | | TF | | | | QYF | 2053 |
| VD10 | Self_ | MART1_A2L | 0 | 0 | 0 | 0 | 12-2 | FAGGGGSSNTG | | | 9 | CASSPGGTEAFF | 1875 |
| | Nonnaive | | | | | | | KLIF | | | | | 2057 |
| VD11 | Self_ | 0 | 0 | 0 | 0 | 0 | 14/DV4 | CAMREGTGRRAL | | | 6-2, 6-3 | CASSYFGGSLSE | 1854 |
| | Nonnaive | | | | | | | TF | | | | QYF | 2053 |
| VD12 | Self_ | 0 | 0 | 0 | 0 | 0 | 14/DV4 | CAMREGTGRRAL | | | 6-2, 6-3 | CASSYFGGSLSE | 1854 |
| | Nonnaive | | | | | | | TF | | | | QYF | 2053 |
| VE10 | Self_ | MART1_A2L | 0 | 0 | 0 | 0 | 14/DV4 | CAMREGTGRRAL | | | 6-2, 6-3 | CASSYFGGSLSE | 1854 |
| | Nonnaive | | | | | | | TF | | | | QYF | 2053 |
| VE11 | Self_ | MART1_A2L | ADI_SVA | 0 | 0 | 0 | 14/DV4 | CAMREGTGRRAL | | | 6-2, 6-3 | CASSYFGGSLSE | 1854 |
| | Nonnaive | | | | | | | TF | | | | QYF | 2053 |
| VE12 | Self_ | MART1_A2L | 0 | 0 | 0 | 0 | 14/DV4 | CAMREGTGRRAL | | | 6-2, 6-3 | CASSYFGGSLSE | 1854 |
| | Nonnaive | | | | | | | TF | | | | QYF | 2053 |
| VF10 | Self_ | MART1_A2L | ADI_SVA | 0 | 0 | 0 | 14/DV4 | CAMREGTGRRAL | | | 6-2, 6-3 | CASSYFGGSLSE | 1854 |
| | Nonnaive | | | | | | | TF | | | | QYF | 2053 |
| VF11 | Self_ | MART1_A2L | 0 | 0 | 0 | 0 | 14/DV4 | CAMREGTGRRAL | | | 6-2, 6-3 | CASSYFGGSLSE | 1854 |
| | Nonnaive | | | | | | | TF | | | | QYF | 2053 |
| VF12 | Self_ | MART1_A2L | 0 | 0 | 0 | 0 | 14/DV4 | CAMREGTGRRAL | | | 6-2, 6-3 | CASSYFGGSLSE | 1854 |
| | Nonnaive | | | | | | | TF | | | | QYF | 2053 |
| VG10 | Self_ | 0 | 0 | 0 | 0 | 0 | 14/DV4 | CAMREGTGRRAL | | | 6-2, 6-3 | CASSYFGGSLSE | 1854 |
| | Nonnaive | | | | | | | TF | | | | QYF | 2053 |
| VG11 | Self_ | MART1_A2L | 0 | 0 | 0 | 0 | 2-Dec | CAVTGQGGKLIF | | | 5-Jun | CASSFGGGGQPQ | 1879 |
| | Nonnaive | | | | | | | | | | | HF | 2058 |
| VG12 | Self_ | MART1_A2L | ADI_SVA | 0 | 0 | 0 | 14/DV4 | CAMREGTGRRAL | | | 6-2, 6-3 | CASSYFGGSLSE | 1854 |
| | Nonnaive | | | | | | | TF | | | | QYF | 2053 |
| VH10 | Self_ | MART1_A2L | 0 | 0 | 0 | 0 | | | | | 6-2, 6-3 | CASSYFGGSLSE | 2053 |
| | Nonnaive | | | | | | | | | | | QYF | |
| VH11 | Self_ | DRIP_MLY | 0 | 0 | 0 | 0 | | | | | | | |
| | Nonnaive | | | | | | | | | | | | |
| VH12 | Self_ | MART1_A2L | 0 | 0 | 0 | 0 | 2-Dec | CAVGLGFGNVLH | | | 1-Apr | CASSLGVGTEAFF | 1877 |
| | Nonnaive | | | | | | | C | | | | | 2059 |
| WA10 | Self_ | MART1_A2L | 0 | 0 | 0 | 0 | 14/DV4 | CAMREGTGRRAL | | | 6-2, 6-3 | CASSYFGGSLSE | 1854 |
| | Nonnaive | | | | | | | TF | | | | QYF | 2053 |
| WA9 | Self_ | MART1_A2L | ADI_SVA | 0 | 0 | 0 | 14/DV4 | CAMREGTGRRAL | | | 6-2, 6-3 | CASSYFGGSLSE | 1854 |
| | Nonnaive | | | | | | | TF | | | | QYF | 2053 |
| WB10 | Self_ | MART1_A2L | ADI_SVA | 0 | 0 | 0 | 14/DV4 | CAMREGTGRRAL | | | 6-2, 6-3 | CASSYFGGSLSE | 1854 |
| | Nonnaive | | | | | | | TF | | | | QYF | 2053 |
| WB9 | Self_ | MART1_A2L | 0 | 0 | 0 | 0 | 14/DV4 | CAMREGTGRRAL | | | 6-2, 6-3 | CASSYFGGSLSE | 1854 |
| | Nonnaive | | | | | | | TF | | | | QYF | 2053 |
| WC10 | Self_ | MART1_A2L | 0 | 0 | 0 | 0 | 14/DV4 | CAMREGTGRRAL | | | 6-2, 6-3 | CASSYFGGSLSE | 1854 |
| | Nonnaive | | | | | | | TF | | | | QYF | 2053 |
| WC9 | Self_ | MART1_A2L | 0 | 0 | 0 | 0 | 14/DV4 | CAMREGTGRRAL | | | 6-2, 6-3 | CASSYFGGSLSE | 1854 |
| | Nonnaive | | | | | | | TF | | | | QYF | 2053 |
| WD10 | Self_ | MART1_A2L | 0 | 0 | 0 | 0 | 14/DV4 | CAMREGTGRRAL | | | 6-2, 6-3 | CASSYFGGSLSE | 1854 |
| | Nonnaive | | | | | | | TF | | | | QYF | 2053 |
| WD9 | Self_ | MART1_A2L | ADI_SVA | 0 | 0 | 0 | 14/DV4 | CAMREGTGRRAL | | | 6-2, 6-3 | CASSYFGGSLSE | 1854 |
| | Nonnaive | | | | | | | TF | | | | QYF | 2053 |
| WE10 | Self_ | MART1_A2L | 0 | 0 | 0 | 0 | 14/DV4 | CAMREGTGRRAL | | | 6-2, 6-3 | CASSYFGGSLSE | 1854 |
| | Nonnaive | | | | | | | TF | | | | QYF | 2053 |
| WE9 | Self_ | 0 | 0 | 0 | 0 | 0 | 14/DV4 | CAMREGTGRRAL | | | 6-2, 6-3 | CASSYFGGSLSE | 1854 |
| | Nonnaive | | | | | | | TF | | | | QYF | 2053 |
| WF10 | Self_ | MART1_A2L | ADI_SVA | 0 | 0 | 0 | 14/DV4 | CAMREGTGRRAL | | | 6-2, 6-3 | CASSYFGGSLSE | 1854 |
| | Nonnaive | | | | | | | TF | | | | QYF | 2053 |
| WF9 | Self_ | MART1_A2L | 0 | 0 | 0 | 0 | 14/DV4 | CAMREGTGRRAL | | | 6-2, 6-3 | CASSYFGGSLSE | 1854 |
| | Nonnaive | | | | | | | TF | | | | QYF | 2053 |
| WG10 | Self_ | DRIP_MLY | 0 | 0 | 0 | 0 | | | | | 12-3, | CASSFGRNRSQN | 2060 |
| | Nonnaive | | | | | | | | | | 12-4 | TEAFF | |
| WG9 | Self_ | MART1_A2L | 0 | 0 | 0 | 0 | 14/DV4 | CAMREGTGRRAL | | | 6-2, 6-3 | CASSYFGGSLSE | 1854 |
| | Nonnaive | | | | | | | TF | | | | QYF | 2053 |
| WH10 | Self_ | 0 | 0 | 0 | 0 | 0 | 14/DV4 | CAMREGPGGTS | | | 6-2, 6-3 | CASSYRQDSNQP | 1878 |
| | Nonnaive | | | | | | | YGKLTF | | | | QHF | 2061 |
| WH9 | Self_ | MART1_A2L | 0 | 0 | 0 | 0 | | | | | 6-2, 6-3 | CASSYFGGSLSE | 2053 |
| | Nonnaive | | | | | | | | | | | QYF | |

TABLE 5
Description of neoantigen and wildtype peptides used for experiment 3 and 4.

| | | Position | | | Wildtype HLA- | | | Mutant HLA- |
|---|---|---|---|---|---|---|---|---|
| Wildtype | Mutant | of | | SEQ | A2 Binding | | SEQ | A2 Binding |
| amino | amino | mutation | Wildtype | ID | NetMHC | Mutant | ID | NetMHC 4.0 |
| acid | acid | in peptide | peptide | NO | 4.0 (nM) | peptide | NO | (nM) |
| T | I | 3 | FLTYLDVSV | 2062 | 6.4 | FLIYLDVSV | 2082 | 4 |
| S | F | 1 | SMPDFDLHL | 2063 | 22.9 | FMPDFDLHL | 2083 | 5.5 |
| S | F | 8 | VLLGVKLSGV | 2064 | 32.5 | VLLGVKLFGV | 2084 | 9.1 |
| H | Y | 8 | ALIHHNTHL | 2065 | 79.3 | ALIHHNTYL | 2085 | 17.9 |
| L | F | 8 | VLENFTILLV | 2066 | 138.5 | VLENFTIFLV | 2086 | 50.6 |
| L | F | 9 | SVLENFTILL | 2067 | 182.7 | SVLENFTIFL | 2087 | 84.7 |
| A | V | 9 | ILTGLNYEA | 2068 | 41.7 | ILTGLNYEV | 2088 | 7.4 |
| S | F | 5 | ALYGSVPVL | 2069 | 15.3 | ALYGFVPVL | 2089 | 8.3 |
| L | M | 3 | VVLSWAPPV | 2070 | 9.6 | VVMSWAPPV | 2090 | 5.8 |
| L | P | 6 | ALLETLSLLL | 2071 | 35.7 | ALLETPSLLL | 2091 | 53.5 |
| L | H | 8 | ALSPVIPLI | 2072 | 8.1 | ALSPVIPHI | 2092 | 11.3 |
| H | Y | 8 | KLFEFLVHGV | 2073 | 4.4 | KLFEFLVYGV | 2093 | 3.3 |
| R | C | 4 | NLNRCSVPV | 2074 | 48.4 | NLNCCSVPV | 2094 | 18.2 |
| C | F | 5 | LIIPCIHLI | 2075 | 32.7 | LIIPFIHLI | 2095 | 24.5 |
| T | P | 6 | LLFGMTPCL | 2076 | 7.4 | LLFGMPPCL | 2096 | 11.7 |
| P | L | 6 | KLSHQPVLL | 2077 | 85.1 | KLSHQLVLL | 2097 | 25.8 |
| H | Y | 5 | AVGSHVYSV | 2078 | 91.5 | AVGSYVYSV | 2098 | 29.3 |
| P | L | 5 | FLYNPLTRV | 2079 | 4.4 | FLYNLLTRV | 2099 | 3.3 |
| Q | K | 8 | KLMNIQQQL | 2080 | 15.4 | KLMNIQQKL | 2100 | 20.3 |
| R | Q | 5 | MLGERLFPL | 2081 | 4 | MLGEQLFPL | 2101 | 3.4 |

TABLE 6
TetTCR-Seq summary for experiment 3.

| | Sorted | | | | | | | | | | | | SEQ ID |
|---|---|---|---|---|---|---|---|---|---|---|---|---|---|
| Cell | Popu- | Detected Peptide by MID Count | | | | | TCRα,1 | | TCRα,2 | | TCRβ | | NO |
| Name | lation | Rank 1 | Rank 2 | Rank 3 | Rank 4 | Rank 5 | TRAV | CDR3α | TRAV | CDR3α | TRBV | CDR3β | (L to R) |
| BA1 | Neo⁺WT⁺ | GANAB | GANAB- | 0 | 0 | 0 | | | | | 29-1*01 | CSVPEGNTGELF | 2312 |
| | | | S5F | | | | | | | | | F | |
| BA10 | Neo⁺WT⁺ | HCV-KLV | 0 | 0 | 0 | 0 | | | | | 7-9*01 | CASSLEGEQYF | 2313 |
| BA11 | Neo⁺WT⁺ | NSDHL- | NSDHL | 0 | 0 | 0 | 14/DV4*01 | CAMRESNTGGFK | | | | | 2102 |
| | | A9V | | | | | | TIF | | | | | |
| BA2 | Neo⁺WT⁺ | SMARCD3 | SMARCD3- | 0 | 0 | 0 | 5*01 | CAVYNTDKLIF | | | 4-1*01 | CASSQGALGYTF | 2103 |
| | | | H8Y | | | | | | | | | | 2314 |
| BA3 | Neo⁺WT⁺ | USP28 | 0 | 0 | 0 | 0 | 13- | GGTSYGKLTF | | | 12-3*01, | CASSFPDRGQGV | 2104 |
| | | | | | | | 2*01/13- | | | | 12-4*01 | YGYTF | 2315 |
| | | | | | | | 2*02 | | | | | | |
| BA6 | Neo⁺WT⁺ | FNDC3B- | FNDC3B | 0 | 0 | 0 | 12-2*01 | CAVNGQAGTALIF | | | | CASYFFALFTDTQ | 2105 |
| | | L3M | | | | | | | | | 25-1*01 | YF | 2316 |
| BA8 | Neo⁺WT⁺ | NSDHL | NSDHL- | 0 | 0 | 0 | | | | | | CSARLKGGGDTQ | 2317 |
| | | | A9V | | | | | | | | 20-1*01 | YF | |
| BA9 | Neo⁺WT⁺ | HCV-KLV | 0 | 0 | 0 | 0 | 38- | CAYTHARLMF | 21*01 | RINSGGSNYKL | 15*01 | CATSRDRGTDTF | 2106 |
| | | | | | | | 2/DV8*01 | | | TF | | F | 2289 |
| | | | | | | | | | | | | | 2318 |
| BB1 | Neo⁺WT⁺ | FNDC3B | FNDC3B- | 0 | 0 | 0 | 12-2*01 | CAGIPDAGGTSYG | | | 6-2*01, | CASSYSSDFWGD | 2107 |
| | | | L3M | | | | | KLTF | | | 6-3*01 | QPQHF | 2319 |
| BB10 | Neo⁺WT⁺ | MLL2 | MLL2-L8H | 0 | 0 | 0 | 12-2*01 | CAVNKPGFGNEKL | | | 27*01 | CASSGAAGTSAY | 2108 |
| | | | | | | | | TF | | | | NEQFF | 2320 |
| BB11 | Neo⁺WT⁺ | SEC24A- | SEC24A | 0 | 0 | 0 | 25*01 | CAGRKTSYDKVIF | | | 4-3*01 | CASSYASTGTLN | 2109 |
| | | PSL | | | | | | | | | | YGYTF | 2321 |
| BB12 | Neo⁺WT⁺ | FNDC3B- | FNDC3B | 0 | 0 | 0 | 8-3*01 | CAVGATNNAGNM | | | 7-9*01 | CASSPDLNPYEQ | 2110 |
| | | L3M | | | | | | LTF | | | | YF | 2322 |
| BB6 | Neo⁺WT⁺ | HCV-KLV | 0 | 0 | 0 | 0 | | | | | 13*01 | CASSSQGETYEQ | 2323 |
| | | | | | | | | | | | | YF | |
| BB7 | Neo⁺WT⁺ | HCV-KLV | 0 | 0 | 0 | 0 | 38- | CAYWEGAQKLVF | | | 15*01 | CATAKEGLAYEQ | 2111 |
| | | | | | | | 2/DV8*01 | | | | | FF | 2324 |
| BB8 | Neo⁺WT⁺ | FNDC3B | FNDC3B- | 0 | 0 | 0 | 8-1*01 | CAVNVYNQGGKLI | | | 13*01 | CASSSGLAGGPK | 2112 |
| | | | L3M | | | | | F | | | | HYEQYF | 2325 |
| BC1 | Neo⁺WT⁺ | NSDHL- | NSDHL | 0 | 0 | 0 | 14/DV4*01 | CAMSVSDTGNQF | | | 15*01 | CATSRDRGLTEA | 2113 |
| | | A9V | | | | | | YF | | | | FF | 2326 |
| BC10 | Neo⁺WT⁺ | FNDC3B | FNDC3B- | 0 | 0 | 0 | 8-3*01 | CAVGAGSNFGNE | | | 6-5*01 | CASSYGGNSPLH | 2114 |
| | | | L3M | | | | | KLTF | | | | F | 2327 |
| BC11 | Neo⁺WT⁺ | AKAP13 | AKAP13- | 0 | 0 | 0 | | | | | 29-1*01 | CSADVGGQNEQ | 2328 |
| | | | Q8K | | | | | | | | | YF | |
| BC12 | Neo⁺WT⁺ | WDR46 | WDR46- | 0 | 0 | 0 | 21*01 | CAVRNRDDKIIF | | | 9*01 | CASSVGTGYEQY | 2115 |
| | | | T3I | | | | | | | | | F | 2329 |
| BC2 | Neo⁺WT⁺ | 0 | 0 | 0 | 0 | 0 | | | | | 12-3*01, | CASSLSSRSNQP | 2330 |
| | | | | | | | | | | | 12-4*01 | QHF | |
| BC4 | Neo⁺WT⁺ | FNDC3B | 0 | 0 | 0 | 0 | 19*01 | CALSEVGAGSYQL | | | | | 2116 |
| | | | | | | | | TF | | | | | |
| BC5 | Neo⁺WT⁺ | FNDC3B | FNDC3B- | 0 | 0 | 0 | 3*01 | CAVQAGGYQKVT | | | 13*01 | CASSSRQGAGDT | 2117 |
| | | | L3M | | | | | F | | | | QYF | 2331 |
| BC8 | Neo⁺WT⁺ | NSDHL- | NSDHL | EMPTY | 0 | 0 | 14/DV4*01 | CAMREGNTGGFK | | | 9*01 | CASSAGGDTEAF | 2118 |
| | | A9V | | | | | | TIF | | | | F | 2332 |
| BC9 | Neo⁺WT⁺ | HCV-KLV | 0 | 0 | 0 | 0 | 38- | CAYGANDMRF | | | 25-1*01 | CASSDGGKDGYT | 2119 |
| | | | | | | | 2/DV8*01 | | | | | F | 2333 |
| BD1 | Neo⁺WT⁺ | FNDC3B | FNDC3B- | 0 | 0 | 0 | | | | | 28*01 | CASSLWRGMGA | 2334 |
| | | | L3M | | | | | | | | | GELFF | |
| BD10 | Neo⁺WT⁺ | FNDC3B | FNDC3B- | 0 | 0 | 0 | 29/DV5*01 | CAASATGGTSYGK | | | 19*01 | CASSFTSGSGHE | 2120 |
| | | | L3M | | | | | LTF | | | | QYF | 2335 |
| BD11 | Neo⁺WT⁺ | ERBB2 | ERBB2- | 0 | 0 | 0 | 14/DV4*01 | CAMHRDDKIIF | | | 12-3*01, | CASSLAVQRPSG | 2121 |
| | | | H8Y | | | | | | | | 12-4*01 | NTIYF | 2336 |
| BD12 | Neo⁺WT⁺ | NSDHL | NSDHL- | 0 | 0 | 0 | 38- | CASGIQGAQKLVF | | | 7-9*01 | CASSLSGVAYGY | 2122 |
| | | | A9V | | | | 2/DV8*01 | | | | | TF | 2337 |
| BD2 | Neo⁺WT⁺ | 0 | 0 | 0 | 0 | 0 | 24*01 | CALSGYSTLTF | | | 2*01 | CASSQGQGSSQ | 2123 |
| | | | | | | | | | | | | YF | 2338 |
| BD3 | Neo⁺WT⁺ | FNDC3B | FNDC3B- | 0 | 0 | 0 | 12-2*01 | CAVSKEGSYIPTF | | | 29-1*01 | CSVRGGGDNSPL | 2124 |
| | | | L3M | | | | | | | | | HF | 2339 |
| BD5 | Neo⁺WT⁺ | NSDHL- | NSDHL | 0 | 0 | 0 | 38-1*01 | CAFMIDNNNDMRF | | | 9*01 | CASSGLAGGPFG | 2125 |
| | | A9V | | | | | | | | | | METQYF | 2340 |
| BD8 | Neo⁺WT⁺ | SMARCD3 | 0 | 0 | 0 | 0 | 8-1*01 | CAVNAWNNDMRF | | | 27*01 | CASTQGGVDTQY | 2126 |
| | | | | | | | | | | | | F | 2341 |
| BE1 | Neo⁺WT⁺ | FNDC3B | FNDC3B- | 0 | 0 | 0 | 8-3*01 | CAVGGEAQGAQK | | | 7-7*01 | CASSWGPGYEQ | 2127 |
| | | | L3M | | | | | LVF | | | | YF | 2342 |
| BE10 | Neo⁺WT⁺ | HCV-KLV | 0 | 0 | 0 | 0 | 38-1*01 | CAVSGAGSYQLTF | | | 7-9*01 | CASSLVDSGLYE | 2128 |
| | | | | | | | | | | | | QYF | 2343 |
| BE12 | Neo⁺WT⁺ | FNDC3B | FNDC3B- | 0 | 0 | 0 | 19*01 | CALSEAMTSGTYK | | | 20-1*01 | CSAREVRDLYNE | 2129 |
| | | | L3M | | | | | YIF | | | | QFF | 2344 |
| BE3 | Neo⁺WT⁺ | FNDC3B | FNDC3B- | 0 | 0 | 0 | 3*01 | CAVSNLMDTGRR | | | 5-8*01 | CASSLSSGPYNE | 2130 |
| | | | L3M | | | | | ALTF | | | | QFF | 2345 |
| BE5 | Neo⁺WT⁺ | NSDHL | NSDHL- | 0 | 0 | 0 | 9-2*01 | CALSEHDMRF | | | 7-9*01 | CASSLPGGPRET | 2131 |
| | | | A9V | | | | | | | | | QYF | 2346 |
| BE9 | Neo⁺WT⁺ | FNDC3B | FNDC3B- | 0 | 0 | 0 | 17*01 | CATDADTGNQFYF | | | 12-3*01, | CASSFGPYGYTF | 2132 |
| | | | L3M | | | | | | | | 12-4*01 | | 2347 |
| BF11 | Neo⁺WT⁺ | NSDHL- | NSDHL | 0 | 0 | 0 | 38- | CALNTGTASKLTF | | | 7-8*01 | CASSLQASGRET | 2133 |
| | | A9V | | | | | 2/DV8*01 | | | | | QYF | 2348 |
| BF12 | Neo⁺WT⁺ | HCV-KLV | EMPTY | 0 | 0 | 0 | 38- | CAYYGGGATNKLI | | | 13*01 | CASSLGSGTQYF | 2134 |
| | | | | | | | 2/DV8*01 | F | | | | | 2349 |
| BF3 | Neo⁺WT⁺ | FNDC3B | FNDC3B- | 0 | 0 | 0 | 14/DV4*01 | CAMSLRSYTGNQF | | | 20-1*01 | CSARISTSSSYEQ | 2135 |
| | | | L3M | | | | | YF | | | | YF | 2350 |
| BF5 | Neo⁺WT⁺ | FNDC3B | FNDC3B- | 0 | 0 | 0 | 29/DV5*01 | CAAKDNYGQNFVF | | | 5-5*01 | CASSLYGGESQE | 2136 |
| | | | L3M | | | | | | | | | TQYF | 2351 |
| BF9 | Neo⁺WT⁺ | FNDC3B- | FNDC3B | 0 | 0 | 0 | | | | | | | |
| | | L3M | | | | | | | | | | | |
| BG1 | Neo⁺WT⁺ | MRM1 | MRM1- | 0 | 0 | 0 | 29/DV5*01 | CAASLRYFGNEKL | 13- | CAVVMEYGNKL | 12-3*01, | CASSPDPYEQYF | 2137 |
| | | | T6P | | | | | TF | 2*01 | VF | 12-4*01 | | 2290 |
| | | | | | | | | | | | | | 2352 |
| BG10 | Neo⁺WT⁺ | PGM5 | PGM5- | 0 | 0 | 0 | 41*01 | CAVTDYNTDKLIF | | | 28*01 | CASSFRGEAFF | 2138 |
| | | | H5Y | | | | | | | | | | 2353 |
| BG11 | Neo⁺WT⁺ | HCV-KLV | 0 | 0 | 0 | 0 | 38- | CAYVEGNYQLIW | | | 19*01 | CASSIAAGNTIYF | 2139 |
| | | | | | | | 2/DV8*01 | | | | | | 2354 |
| BG12 | Neo⁺WT⁺ | 0 | 0 | 0 | 0 | 0 | 19*01 | CALSEVRYSSASKI | | | 27*01 | CASSLHREVNEK | 2140 |
| | | | | | | | | IF | | | | LFF | 2355 |
| BG2 | Neo⁺WT⁺ | FNDC3B | FNDC3B- | 0 | 0 | 0 | 19*01 | CALRGRVAGANNL | | | 6-1*01 | CASSEWAGQPQ | 2141 |
| | | | L3M | | | | | FF | | | | HF | 2356 |
| BG5 | Neo⁺WT⁺ | NSDHL | NSDHL- | 0 | 0 | 0 | 8-3*01 | CAVAFNNAGNMLT | | | 5-4*01 | CASSGGGAEAFF | 2142 |
| | | | A9V | | | | | F | | | | | 2357 |
| BG7 | Neo⁺WT⁺ | ERBB2 | ERBB2- | 0 | 0 | 0 | 10*01 | CVVSGVNVWGTY | | | 19*01 | CASSIESGSKQR | 2143 |
| | | | H8Y | | | | | KYIF | | | | NEQFF | 2358 |
| BG9 | Neo⁺WT⁺ | 0 | 0 | 0 | 0 | 0 | | | | | 10-3*01 | CATREPPNTEAF | 2359 |
| | | | | | | | | | | | | F | |
| BH1 | Neo⁺WT⁺ | AKAP13 | AKAP13- | 0 | 0 | 0 | 24*01 | CAFPMDSNYQLIW | | | 6-6*01 | CASSYNSMNTEA | 2144 |
| | | | Q8K | | | | | | | | | FF | 2360 |
| BH10 | Neo⁺WT⁺ | FNDC3B | FNDC3B- | 0 | 0 | 0 | 12-2*01 | CAPGGEKLTF | | | 7-6*01 | CASSLGGPAEQY | 2145 |
| | | | L3M | | | | | | | | | F | 2361 |
| BH11 | Neo⁺WT⁺ | HCV-KLV | 0 | 0 | 0 | 0 | 38-2/ | CSVGGGSEKLVF | | | 7-9*01 | CASSFGGYEQYF | 2146 |
| | | | | | | | DV8*01 | | | | | | 2362 |
| BH2 | Neo⁺WT⁺ | FNDC3B- | FNDC3B | 0 | 0 | 0 | | | | | 28*01 | CASSSSGIGETQ | 2363 |
| | | L3M | | | | | | | | | | YF | |
| BH5 | Neo⁺WT⁺ | MLL2 | MLL2-L8H | 0 | 0 | 0 | 12-2*01 | CAGLNSDGQKLLF | | | 6-2*01, | CASSYSSDRSSY | 2147 |
| | | | | | | | | | | | 6-3*01 | EQYF | 2364 |
| BH6 | Neo⁺WT⁺ | MLL2-L8H | GANAB | 0 | 0 | 0 | 12-2*01 | CAVNSKSGYSTLT | | | 6-2*01, | CASKSWDMAYE | 2148 |
| | | | | | | | | F | | | 6-3*01 | QYF | 2365 |
| BH7 | Neo⁺WT⁺ | HCV-KLV | 0 | 0 | 0 | 0 | 12-2*01 | CAVSMDTGRRALT | | | 28*01 | CASSSGTSLTLTY | 2149 |
| | | | | | | | | F | | | | NEQFF | 2366 |
| BH8 | Neo⁺WT⁺ | FNDC3B | FNDC3B- | 0 | 0 | 0 | 14/DV4*01 | CAMREGGNDMRF | | | 4-2*01 | CASSPRIGGPRE | 2150 |
| | | | L3M | | | | | | | | | GYTF | 2367 |
| BH9 | Neo⁺WT⁺ | FNDC3B- | FNDC3B | 0 | 0 | 0 | 3*01 | CAVRDKNRDDKIIF | | | 7-9*01 | CASQPWFNTGEL | 2151 |
| | | L3M | | | | | | | | | | FF | 2368 |
| CA5 | Neo⁺WT⁺ | NSDHL- | NSDHL | 0 | 0 | 0 | 5*01 | CAEKGAGGSYIPT | | | 10-3*01 | CAISPGGEQFF | 2152 |
| | | A9V | | | | | | F | | | | | 2369 |
| CA6 | Neo⁺WT⁺ | NSDHL | NSDHL- | 0 | 0 | 0 | 14/DV4*01 | CAMREVREAGNQ | | | 6-6*01 | CASSYSLAGEFF | 2153 |
| | | | A9V | | | | | FYF | | | | | 2370 |
| CB4 | Neo⁺WT⁺ | AKAP13 | AKAP13- | 0 | 0 | 0 | | | | | 3-1*01 | CASGKGDTEAFF | 2371 |
| | | | Q8K | | | | | | | | | | |
| CB5 | Neo⁺WT⁺ | HCV-KLV | 0 | 0 | 0 | 0 | 38- | CAYLDDYKLSF | | | 9*01 | CASSVETTDYGY | 2154 |
| | | | | | | | 2/DV8*01 | | | | | TF | 2372 |
| CB6 | Neo⁺WT⁺ | FNDC3B | FNDC3B- | 0 | 0 | 0 | 41*01 F | CAVRLDDFGNVLH | | | 7-2*01 | CASSFAPGQGIE | 2155 |
| | | | L3M | | | | | C | | | | KLFF | 2373 |
| CC11 | Neo⁺WT⁺ | FNDC3B | FNDC3B- | 0 | 0 | 0 | 14/DV4*01 | CAMREGPSQAGT | | | 2*01 | CASSEVSVLYEQ | 2156 |
| | | | L3M | | | | | ALIF | | | | YF | 2374 |
| CC6 | Neo⁺WT⁺ | MLL2-L8H | MLL2 | 0 | 0 | 0 | 14/DV4*01 | CALYGGSQGNLIF | 17*01 | CATASLRNYGQ | 9*01 | CASSVETGGLDT | 2157 |
| | | | | | | | | | | NFVF | | QYF | 2291 |
| | | | | | | | | | | | | | 2375 |
| CC9 | Neo⁺WT⁺ | NSDHL- | NSDHL | 0 | 0 | 0 | 14/DV4*01 | CAMRGSDGQKLL | | | 9*01 | CASSRGGGTEAF | 2158 |
| | | A9V | | | | | | F | | | | F | 2376 |
| CD12 | Neo⁺WT⁺ | NSDHL- | NSDHL | 0 | 0 | 0 | 14/DV4*01 | CAMREPYSGAGS | | | 9*01 | CASGAQHTEAFF | 2159 |
| | | A9V | | | | | | YQLTF | | | | | 2377 |
| CD3 | Neo⁺WT⁺ | HCV-KLV | 0 | 0 | 0 | 0 | 38- | CAYFELDMRF | 26- | CIVRVDERGTS | 5-5*01 | CASSFEGQETQY | 2160 |
| | | | | | | | 2/DV8*01 | | 1*01 | YGKLTF | | F | 2292 |
| | | | | | | | | | | | | | 2378 |
| CE8 | Neo⁺WT⁺ | HCV-KLV | 0 | 0 | 0 | 0 | | | | | | | |
| CF10 | Neo⁺WT⁺ | FNDC3B | FNDC3B- | 0 | 0 | 0 | | | | | 10-3*01 | CAISELGYEQYF | 2379 |
| | | | L3M | | | | | | | | | | |
| CG6 | Neo⁺WT⁺ | HCV-KLV | 0 | 0 | 0 | 0 | | | | | 20-1*01 | CSATSEYTEAFF | 2380 |
| CH10 | Neo⁺WT⁺ | HCV-KLV | 0 | 0 | 0 | 0 | 38-2/ | CAYSTGDMRF | | | 10-3*01 | CAISSDRTDEQYF | 2161 |
| | | | | | | | DV8*01 | | | | | | 2381 |
| CH6 | Neo⁺WT⁺ | EMPTY | GNL3L | PABPC1 | 0 | 0 | 12-1*01 | CVVSPYNQGGKLI | | | 7-9*01 | CASSLDIGDQPQ | 2162 |
| | | | | | | | | F | | | | HF | 2382 |
| CH8 | Neo⁺WT⁺ | 0 | 0 | 0 | 0 | 0 | | | | | | | |
| AA1 | Neo⁺WT⁻ | MLL2-L8H | 0 | 0 | 0 | 0 | 5*01 | CAESRGTDKLIF | | | 2*01 | CASSFMETQYF | 2163 |
| | | | | | | | | | | | | | 2383 |
| AA10 | Neo⁺WT⁻ | GNL3L- | 0 | 0 | 0 | 0 | 6*01 | CALQTGANNLFF | | | 27*01 | CASSLWAGETQY | 2164 |
| | | R4C | | | | | | | | | | F | 2384 |
| AA11 | Neo⁺WT⁻ | GNL3L- | 0 | 0 | 0 | 0 | 5*01 | CAEYSSASKIIF | | | 11-3*01 | CASSLDYNEQFF | 2165 |
| | | R4C | | | | | | | | | | | 2385 |
| AA12 | Neo⁺WT⁻ | SEC24A- | 0 | 0 | 0 | 0 | 1-1*01 | CAVLNSGNTPLVF | | | 12-3*01, | CASSPGRTQYF | 2166 |
| | | PSL | | | | | | | | | 12-4*01 | | 2386 |
| AA2 | Neo⁺WT⁻ | MLL2-L8H | 0 | 0 | 0 | 0 | 25*01 | CAGNYGGSQGNLI | 12- | CAVGAEYGNKL | 19*01 | CASSMAAGTHEQ | 2167 |
| | | | | | | | | F | 2*01 | VF | | YF | 2293 |
| | | | | | | | | | | | | | 2387 |
| AA3 | Neo⁺WT⁻ | GNL3L- | 0 | 0 | 0 | 0 | 26-2*01 | CILRDALIQAGNML | | | 20-1*01 | CSARTDRGNNYG | 2168 |
| | | R4C | | | | | | TF | | | | YTF | 2388 |
| AA4 | Neo⁺WT⁻ | GNL3L- | 0 | 0 | 0 | 0 | 12-2*01 | CAVNLNYGGSQG | | | 4-2*01 | CASSANQGYEQY | 2169 |
| | | R4C | | | | | | NLIF | | | | F | 2389 |
| AA5 | Neo⁺WT⁻ | GNL3L- | 0 | 0 | 0 | 0 | | | | | 2*01 | CASSEWGIEAFF | 2390 |
| | | R4C | | | | | | | | | | | |
| AA6 | Neo⁺WT⁻ | GNL3L- | 0 | 0 | 0 | 0 | 12-2*01 | CAVNPVQGAQKLV | | | 4-2*01 | CASSQVEGYEQY | 2170 |
| | | R4C | | | | | | F | | | | F | 2391 |
| AA7 | Neo⁺WT⁻ | GANAB- | 0 | 0 | 0 | 0 | 29/DV5*01 | CAASAGLAGSYQL | | | 6-1*01 | CASSEISSGGPFL | 2171 |
| | | S5F | | | | | | TF | | | | DTQYF | 2392 |
| AA8 | Neo⁺WT⁻ | GNL3L- | 0 | 0 | 0 | 0 | 13-1*01 | CAASEAF | | | 6-2*01, | CASSYSSRVNYE | 2172 |
| | | R4C | | | | | | | | | 6-3*01 | QYF | 2393 |
| AA9 | Neo⁺WT⁻ | 0 | 0 | 0 | 0 | 0 | 1-2*01 | CAVRESYGQNFVF | | | 7-6*01 | CASSSGLAGNST | 2173 |
| | | | | | | | | | | | | QYF | 2394 |
| AB1 | Neo⁺WT⁻ | 0 | 0 | 0 | 0 | 0 | 21*01 | CAVRGYSTLTF | | | 2*01 | CASTTGLEAFF | 2174 |
| | | | | | | | | | | | | | 2395 |
| AB10 | Neo⁺WT⁻ | GNL3L- | 0 | 0 | 0 | 0 | 22*01 | CAVVTTTDKLIF | | | 20-1*01 | CSARDLGGGGD | 2175 |
| | | R4C | | | | | | | | | | EQFF | 2396 |
| AB11 | Neo⁺WT⁻ | 0 | 0 | 0 | 0 | 0 | 12-2*01 | CAVMDDSWGKLQ | | | 5-1*01 | CASSLATGGGEQ | 2176 |
| | | | | | | | | F | | | | YF | 2397 |
| AB12 | Neo⁺WT⁻ | GNL3L- | 0 | 0 | 0 | 0 | 13-2*01 | CAVSNSGGSNYKL | | | 6-5*01 | CASSYGGISYGY | 2177 |
| | | R4C | | | | | | TF | | | | TF | 2398 |
| AB2 | Neo⁺WT⁻ | GNL3L- | 0 | 0 | 0 | 0 | 13-2*01 | CAETGQGGGADG | | | 6-5*01 | CASSYASGGYEQ | 2178 |
| | | R4C | | | | | | LTF | | | | YF | 2399 |
| AB3 | Neo⁺WT⁻ | NSDHL- | 0 | 0 | 0 | 0 | 3*01 | CAVRDMDNARLM | | | 9*01 | CASSVGGDIGIGY | 2179 |
| | | A9V | | | | | | F | | | | TF | 2400 |
| AB4 | Neo⁺WT⁻ | MRM1- | 0 | 0 | 0 | 0 | 3*01 | CAVRDQAGTALIF | | | 13*01 | CASSFGPVEQYF | 2180 |
| | | T6P | | | | | | | | | | | 2401 |
| AB5 | Neo⁺WT⁻ | GANAB- | 0 | 0 | 0 | 0 | 13-2*01 | CAETGDSNYQLIW | | | 15*01 | CATSEGLQYEQY | 2181 |
| | | S5F | | | | | | | | | | F | 2402 |
| AB6 | Neo⁺WT⁻ | GNL3L- | 0 | 0 | 0 | 0 | 22*01 | CAVRTSYDKVIF | | | 20-1*01 | CSVTQGDGTDTQ | 2182 |
| | | R4C | | | | | | | | | | YF | 2403 |
| AB7 | Neo⁺WT⁻ | PGM5- | 0 | 0 | 0 | 0 | 12-3*01 | CAMSATASGTYKY | | | 9*01 | CASSVEGAHPIQ | 2183 |
| | | H5Y | | | | | | IF | | | | ETQYF | 2404 |
| AB8 | Neo⁺WT⁻ | SEC24A- | 0 | 0 | 0 | 0 | 12-1*01 | CVVNQRGGGADG | | | 13*01 | CASSLGQTVTQE | 2184 |
| | | PSL | | | | | | LTF | | | | TQYF | 2405 |
| AB9 | Neo⁺WT⁻ | 0 | 0 | 0 | 0 | 0 | 19*01 | CALSEAENDYKLS | | | 3-1*01 | CASSQDLTASYY | 2185 |
| | | | | | | | | F | | | | NEQFF | 2406 |
| AC1 | Neo⁺WT⁻ | GNL3L- | 0 | 0 | 0 | 0 | 5*01 | CAESLRPGGGAD | | | 9*01 | CASSVAAGGAYE | 2186 |
| | | R4C | | | | | | GLTF | | | | QYF | 2407 |
| AC10 | Neo⁺WT⁻ | FNDC3B- | 0 | 0 | 0 | 0 | 20*01 | CAVQASSGAGSY | | | 4-2*01 | CASRGPYNEQFF | 2187 |
| | | L3M | | | | | | QLTF | | | | | 2408 |
| AC11 | Neo⁺WT⁻ | PGM5- | 0 | 0 | 0 | 0 | 8-3*01 | CAVGGGSQGNLIF | | | 13*01 | CASSLATEQFF | 2188 |
| | | H5Y | | | | | | | | | | | 2409 |
| AC12 | Neo⁺WT⁻ | SEC24A- | 0 | 0 | 0 | 0 | 16*01 | CALRDSSGGSYIP | 21*01 | CAVTWGHNNA | 7-6*01 | CASSLESTANTE | 2189 |
| | | PSL | | | | | | TF | | GNMLTF | | AFF | 2294 |
| | | | | | | | | | | | | | 2410 |
| AC2 | Neo⁺WT⁻ | GNL3L- | 0 | 0 | 0 | 0 | | | | | 5-8*01 | CASNPGPTYGYT | 2411 |
| | | R4C | | | | | | | | | | F | |
| AC3 | Neo⁺WT⁻ | GNL3L- | 0 | 0 | 0 | 0 | 10*01 | CVTGTNAGKSTF | 12- | CALLLGGGADG | 2*01 | CAIMSSGRADGE | 2190 |
| | | R4C | | | | | | | 2*01 | LTF | | LFF | 2295 |
| | | | | | | | | | | | | | 2412 |
| AC4 | Neo⁺WT⁻ | NSDHL- | 0 | 0 | 0 | 0 | 9-2*01 | CALSDSVNNAGN | | | 9*01 | CASSQGSDEQYF | 2191 |
| | | A9V | | | | | | MLTF | | | | | 2413 |
| AC5 | Neo⁺WT⁻ | GNL3L- | 0 | 0 | 0 | 0 | 26-1*01 | CIVRGDIKAAGNKL | 12- | CAMIGNSGNTP | 6-5*01 | CASSYGGAYEQY | 2192 |
| | | R4C | | | | | | TF | 3*01 | LVF | | F | 2296 |
| | | | | | | | | | | | | | 2414 |
| AC6 | Neo⁺WT⁻ | NSDHL- | 0 | 0 | 0 | 0 | 9-2*01 | CALADMNRDDKIIF | | | 9*01 | CASSVDPGQSYE | 2193 |
| | | A9V | | | | | | | | | | QYF | 2415 |
| AC7 | Neo⁺WT⁻ | WDR46- | 0 | 0 | 0 | 0 | 12-2*01 | CAVKGGGSYIPTF | | | | | 2194 |
| | | T3I | | | | | | | | | | | |
| AC8 | Neo⁺WT⁻ | GNL3L- | 0 | 0 | 0 | 0 | 20*01 | CAIHRGPGAGSYQ | | | 19*01 | CASSIVDGYEQY | 2195 |
| | | R4C | | | | | | LTF | | | | F | 2416 |
| AC9 | Neo⁺WT⁻ | NSDHL- | 0 | 0 | 0 | 0 | 14/DV4*01 | CAMREPDSNYQLI | 13- | CAENRNAGNN | 9*01 | CASSGFRGELFF | 2196 |
| | | A9V | | | | | | W | 2*01 | RKLIW | | | 2297 |
| | | | | | | | | | | | | | 2417 |
| AD1 | Neo⁺WT⁻ | GNL3L- | 0 | 0 | 0 | 0 | 12-2*01 | CAVYSSASKIIF | | | 6-5*01 | CASSYGQGYEQY | 2197 |
| | | R4C | | | | | | | | | | F | 2418 |
| AD10 | Neo⁺WT⁻ | MLL2-L8H | 0 | 0 | 0 | 0 | 19*01 | CALRENYNNNDM | 16*01 | CALSNAGNNRK | 3-1*01 | CASSQVGGSYPR | 2198 |
| | | | | | | | | RF | | LIW | | EQFF | 2298 |
| | | | | | | | | | | | | | 2149 |
| AD11 | Neo⁺WT⁻ | GNL3L- | 0 | 0 | 0 | 0 | 22*01 | CAVKTSYDKVIF | | | 28*01 | CASSRGGHEQYF | 2199 |
| | | R4C | | | | | | | | | | | 2420 |
| AD12 | Neo⁺WT⁻ | GNL3L- | 0 | 0 | 0 | 0 | 10*01 | CVVTTTGGGYNKL | 1-2*01 | CAVRDTGGGN | 2*01 | CASSDPNDYEQY | 2200 |
| | | R4C | | | | | | IF | | KLTF | | F | 2299 |
| | | | | | | | | | | | | | 2421 |
| AD2 | Neo⁺WT⁻ | GNL3L- | 0 | 0 | 0 | 0 | 13-1*01 | CAATPTNAGKSTF | | | 19*01 | CASSIVGQGYEQ | 2201 |
| | | R4C | | | | | | | | | | YF | 2422 |
| AD3 | Neo⁺WT⁻ | GNL3L- | 0 | 0 | 0 | 0 | 35*01 | CAGHNNNAGNML | | | | | 2202 |
| | | R4C | | | | | | TF | | | | | |
| AD4 | Neo⁺WT⁻ | MLL2-L8H | 0 | 0 | 0 | 0 | 12-3*01 | CASGEYYGQNFVF | | | 19*01 | CASSMGGVGTEA | 2203 |
| | | | | | | | | | | | | FF | 2423 |
| AD5 | Neo⁺WT⁻ | GNL3L- | 0 | 0 | 0 | 0 | 6*01 | CALSGYSTLTF | | | 4-2*01 | CASSPYSNQPQH | 2123 |
| | | R4C | | | | | | | | | | F | 2424 |
| AD6 | Neo⁺WT⁻ | GNL3L- | 0 | 0 | 0 | 0 | 22*01 | CAVKTSYDKVIF | | | | | 2199 |
| | | R4C | | | | | | | | | | | |
| AD7 | Neo⁺WT⁻ | MLL2-L8H | 0 | 0 | 0 | 0 | 12-2*01 | CAVGGYNFNKFYF | 12- | CVALRGGSQG | 5-6*01 | CASSFRDSSYEQ | 2204 |
| | | | | | | | | | 1*01 | NLIF | | YF | 2300 |
| | | | | | | | | | | | | | 2425 |
| AD8 | Neo⁺WT⁻ | GNL3L- | 0 | 0 | 0 | 0 | 19*01 | CALSEADTGGFKTI | | | 6-6*01 | CASSYSVKGQDY | 2205 |
| | | R4C | | | | | | F | | | | SYEQYF | 2426 |
| AD9 | Neo⁺WT⁻ | MLL2-L8H | 0 | 0 | 0 | 0 | 25*01 | CAGTGAGSYQLTF | | | 6-5*01 | CASRLHGGTPSY | 2206 |
| | | | | | | | | | | | | EQYF | 2427 |
| AE1 | Neo⁺WT⁻ | PGM5- | 0 | 0 | 0 | 0 | 3*01 | CAVRDMQDSNYQ | | | 9*01 | CASSVEGSTEAF | 2207 |
| | | H5Y | | | | | | LIW | | | | F | 2428 |
| AE10 | Neo⁺WT⁻ | GNL3L- | 0 | 0 | 0 | 0 | | | | | 4-2*01 | CASSQAGGYEQY | 2429 |
| | | R4C | | | | | | | | | | F | |
| AE11 | Neo⁺WT⁻ | TEAD1- | 0 | 0 | 0 | 0 | 14/DV4*01 | CAMRANSGGYQK | | | 5-5*01 | CASTQPVDMNTE | 2208 |
| | | L9F | | | | | | VTF | | | | AFF | 2430 |
| AE12 | Neo⁺WT⁻ | SMARCD3- | 0 | 0 | 0 | 0 | | | | | 28*01 | CASSLYRGGDTQ | 2431 |
| | | H8Y | | | | | | | | | | YF | |
| AE2 | Neo⁺WT⁻ | GNL3L- | 0 | 0 | 0 | 0 | 6*01 | CALQTGANNLFF | | | 27*01 | CASSLWAGETQY | 2164 |
| | | R4C | | | | | | | | | | F | 2384 |
| AE3 | Neo⁺WT⁻ | GNL3L- | 0 | 0 | 0 | 0 | 6*01 | CALQTGANNLFF | | | 27*01 | CASSLWAGETQY | 2164 |
| | | R4C | | | | | | | | | | F | 2384 |
| AE4 | Neo⁺WT⁻ | MLL2-L8H | 0 | 0 | 0 | 0 | 12-2*01 | CAVGGYNFNKFYF | 12- | CVALRGGSQG | 5-6*01 | CASSFRDSSYEQ | 2204 |
| | | | | | | | | | 1*01 | NLIF | | YF | 2300 |
| | | | | | | | | | | | | | 2425 |
| AE5 | Neo⁺WT⁻ | FNDC3B- | 0 | 0 | 0 | 0 | 3*01 | CAVRDRAGGYQK | 13- | CAEIGNTGGFK | 13*01 | CASSSRLSQETQ | 2209 |
| | | L3M | | | | | | VTF | 2*01 | TIF | | YF | 2301 |
| | | | | | | | | | | | | | 2432 |
| AE6 | Neo⁺WT⁻ | PGM5- | 0 | 0 | 0 | 0 | 10*01 | CVVSLDYIPTF | | | 9*01 | CASSVEGSGETQ | 2210 |
| | | H5Y | | | | | | | | | | YF | 2433 |
| AE7 | Neo⁺WT⁻ | GNL3L- | 0 | 0 | 0 | 0 | 5*01 | CAEKNTDKLIF | 12- | CAVNRDDYKLS | 9*01 | CASSVSQGGYEQ | 2211 |
| | | R4C | | | | | | | 2*01 | F | | YF | 2302 |
| | | | | | | | | | | | | | 2434 |
| AE8 | Neo⁺WT⁻ | GNL3L- | 0 | 0 | 0 | 0 | 22*01 | CAVRTSYDKVIF | | | 20-1*01 | CSAPGGSGANVL | 2182 |
| | | R4C | | | | | | | | | | TF | 2435 |
| AE9 | Neo⁺WT⁻ | GANAB- | 0 | 0 | 0 | 0 | 8-3*01 | CAVAVWGNNAGN | 12- | CAVLTDSWGKL | 6-5*01 | CASSNVLAGGRD | 2212 |
| | | S5F | | | | | | MLTF | 2*01 | QF | | TQYF | 2303 |
| | | | | | | | | | | | | | 2436 |
| AF1 | Neo⁺WT⁻ | PGM5- | 0 | 0 | 0 | 0 | 8-2*01 | CVVSNSGNTPLVF | | | 7-9*01 | CASSLGDRGPQP | 2213 |
| | | H5Y | | | | | | | | | | QHF | 2437 |
| AF10 | Neo⁺WT⁻ | GNL3L- | 0 | 0 | 0 | 0 | 19*01 | CALSEANDGQKLL | | | 6-2*01, | CASTLAGGPYEQ | 2214 |
| | | R4C | | | | | | F | | | 6-3*01 | YF | 2438 |
| AF11 | Neo⁺WT⁻ | GANAB- | 0 | 0 | 0 | 0 | 1-1*01 | CAVSLYNQGGKLI | | | 19*01 | CASTGTDSYEQY | 2215 |
| | | S5F | | | | | | F | | | | F | 2439 |
| AF12 | Neo⁺WT⁻ | GNL3L- | 0 | 0 | 0 | 0 | 22*01 | CAVETSYDKVIF | | | | | 2216 |
| | | R4C | | | | | | | | | | | |
| AF2 | Neo⁺WT⁻ | GANAB- | 0 | 0 | 0 | 0 | 14/DV4*01 | CAMREPSQGGSE | | | 27*01 | CASSNQETQYF | 2217 |
| | | S5F | | | | | | KLVF | | | | | 2440 |
| AF3 | Neo⁺WT⁻ | GNL3L- | 0 | 0 | 0 | 0 | 38- | CASAGTSYDKVIF | | | 20-1*01 | CSVRTPSSYEQY | 2218 |
| | | R4C | | | | | 2/DV8*01 | | | | | F | 2441 |
| AF4 | Neo⁺WT⁻ | GNL3L- | 0 | 0 | 0 | 0 | 13-2*01 | CAESSSGSARQLT | | | 4-3*01 | CASSQVPGGYEQ | 2219 |
| | | R4C | | | | | | F | | | | YF | 2442 |
| AF5 | Neo⁺WT⁻ | GANAB- | 0 | 0 | 0 | 0 | 29/DV5*01 | CAASAQGGTSYG | | | 19*01 | CASRMGTSGSTD | 2220 |
| | | S5F | | | | | | KLTF | | | | TQYF | 2443 |
| AF6 | Neo⁺WT⁻ | GNL3L- | 0 | 0 | 0 | 0 | | | | | 20-1*01 | CSALGLAGGQGG | 2444 |
| | | R4C | | | | | | | | | | ELFF | |
| AF7 | Neo⁺WT⁻ | GNL3L- | 0 | 0 | 0 | 0 | 22*01 | CAVKTSYDKVIF | | | 20-1*01 | CSAGVYEQYF | 2199 |
| | | R4C | | | | | | | | | | | 2445 |
| AF8 | Neo⁺WT⁻ | GNL3L- | 0 | 0 | 0 | 0 | 12-2*01 | CAVFYGNNRLAF | | | 9*01 | CASSVWDSLTGE | 2221 |
| | | R4C | | | | | | | | | | LFF | 2446 |
| AF9 | Neo⁺WT⁻ | GNL3L- | 0 | 0 | 0 | 0 | 22*01 | CAVRTSYDKVIF | | | 19*01 | CASSWDNGGYT | 2182 |
| | | R4C | | | | | | | | | | F | 2447 |
| CA1 | Neo⁺WT⁻ | NSDHL- | 0 | 0 | 0 | 0 | 19*01 | CALSEVITGANNLF | | | 9*01 | CASSVGSQETQY | 2222 |
| | | A9V | | | | | | F | | | | F | 2448 |
| CA10 | Neo⁺WT⁻ | PGM5- | 0 | 0 | 0 | 0 | 1-1*01 | CAVRDWYGGSQG | | | 6-1*01 | CASILGLTTYNEQ | 2223 |
| | | H5Y | | | | | | NLIF | | | | FF | 2449 |
| CA11 | Neo⁺WT⁻ | GNL3L- | 0 | 0 | 0 | 0 | 29/DV5*01 | CAGADKLIF | 27*01 | CAGDGGSQGN | 6-5*01 | CASSWTGAGYE | 2224 |
| | | R4C | | | | | | | | LIF | | QYF | 2304 |
| | | | | | | | | | | | | | 2450 |
| CA12 | Neo⁺WT⁻ | 0 | 0 | 0 | 0 | 0 | 5*01 | CAESSFYVSGGYN | | | 11-3*01 | CASSLGETQYF | 2225 |
| | | | | | | | | KLIF | | | | | 2451 |
| CA2 | Neo⁺WT⁻ | GNL3L- | 0 | 0 | 0 | 0 | 8-2*01 | CVVSDKEWGGGA | | | 14*01 | | 2226 |
| | | R4C | | | | | | DGLTF | | | | | |
| CA3 | Neo⁺WT⁻ | 0 | 0 | 0 | 0 | 0 | | | | | 2*01 | CASRYREGVEKL | 2452 |
| | | | | | | | | | | | | FF | |
| CA4 | Neo⁺WT⁻ | 0 | 0 | 0 | 0 | 0 | | | | | | | |
| CA7 | Neo⁺WT⁻ | 0 | 0 | 0 | 0 | 0 | 13-1*01 | CAAPRNDKIIF | | | 6-5*01 | CASSYSGPTGYE | 2227 |
| | | | | | | | | | | | | QYF | 2453 |
| CA8 | Neo⁺WT⁻ | GANAB- | 0 | 0 | 0 | 0 | 7*01 | CALGELVTGGGNK | | | 5-6*01 | CASSLNREGNTE | 2228 |
| | | S5F | | | | | | LTF | | | | AFF | 2454 |
| CA9 | Neo⁺WT⁻ | MLL2-L8H | 0 | 0 | 0 | 0 | 12-2*01 | CAVISNQFYF | | | 6-5*01 | CASSYEGALSYE | 2229 |
| | | | | | | | | | | | | QYF | 2455 |
| CB1 | Neo⁺WT⁻ | GNL3L- | 0 | 0 | 0 | 0 | 25*01 F | PNYGGSQGNLIF | | | 20-1*01 | CSAREGLAAGEL | 2230 |
| | | R4C | | | | | | | | | | FF | 2456 |
| CB10 | Neo⁺WT⁻ | GNL3L- | 0 | 0 | 0 | 0 | 12-2*01 | CAVNPRDDKIIF | | | 3-1*01 | CASSPGQGLAYE | 2231 |
| | | R4C | | | | | | | | | | QYF | 2457 |
| CB11 | Neo⁺WT⁻ | FNDC3B- | 0 | 0 | 0 | 0 | 12-2*01 | CAVKDRGGSEKLV | | | 6-6*01 | CASRDSLTGELF | 2232 |
| | | L3M | | | | | | F | | | | F | 2458 |
| CB12 | Neo⁺WT⁻ | GNL3L- | 0 | 0 | 0 | 0 | | | | | 6-5*01 | CASSPSGGSYGY | 2459 |
| | | R4C | | | | | | | | | | TF | |
| CB2 | Neo⁺WT⁻ | GNL3L- | 0 | 0 | 0 | 0 | 13-1*01 | CAASNDQKLVF | | | 9*01 | CASSISTSGYEQF | 2233 |
| | | R4C | | | | | | | | | | F | 2460 |
| CB3 | Neo⁺WT⁻ | GNL3L- | 0 | 0 | 0 | 0 | 13-1*01 | CAAFSNQAGTALIF | | | 6-5*01 | CASSYSNGGYGY | 2234 |
| | | R4C | | | | | | | | | | TF | 2461 |
| CB7 | Neo⁺WT⁻ | 0 | 0 | 0 | 0 | 0 | | | | | 7-2*01 | CASSFWTSGGE | 2462 |
| | | | | | | | | | | | | QYF | |
| CB8 | Neo⁺WT⁻ | 0 | 0 | 0 | 0 | 0 | 8-3*01 | CAVGFDNNAGNM | | | 10-3*01 | CAISERWDGYNE | 2235 |
| | | | | | | | | LTF | | | | QFF | 2463 |
| CC1 | Neo⁺WT⁻ | GNL3L- | 0 | 0 | 0 | 0 | | | | | 7-6*01 | CASSFLGDEQFF | 2464 |
| | | R4C | | | | | | | | | | | |
| CC10 | Neo⁺WT⁻ | NSDHL- | 0 | 0 | 0 | 0 | | | | | 15*01 | CATSRDLGGQQP | 2465 |
| | | A9V | | | | | | | | | | QHF | |
| CC12 | Neo⁺WT⁻ | GNL3L- | 0 | 0 | 0 | 0 | 22*01 | CAVYSSASKIIF | 10*01 | CVVNPYNTDKLI | 4-3*01 | CASSVGEGTEAF | 2197 |
| | | R4C | | | | | | | | F | | F | 2305 |
| | | | | | | | | | | | | | 2466 |
| CC2 | Neo⁺WT⁻ | USP28- | 0 | 0 | 0 | 0 | 30*01 | CGTRGGSGNTPL | 35*01 | CAGQMYSGGG | 12-3*01, | CASTATFGVTEA | 2236 |
| | | C5F | | | | | | VF | | ADGLTF | 12-4*01 | FF | 2306 |
| | | | | | | | | | | | | | 2467 |
| CC3 | Neo⁺WT⁻ | GNL3L- | 0 | 0 | 0 | 0 | 12-2*01 | CAVANDYKLSF | | | 6-5*01 | CASSYSLAAEAFF | 2237 |
| | | R4C | | | | | | | | | | | 2468 |
| CC4 | Neo⁺WT⁻ | MRM1- | 0 | 0 | 0 | 0 | | | | | 14*01 | CASSLTGSEQYF | 2469 |
| | | T6P | | | | | | | | | | | |
| CC7 | Neo⁺WT⁻ | 0 | 0 | 0 | 0 | 0 | 12-2*01 | CALLTEDSNYQLI | | | 2*01 | CASSGELGSPLH | 2238 |
| | | | | | | | | W | | | | F | 2470 |
| CD1 | Neo⁺WT⁻ | GANAB- | 0 | 0 | 0 | 0 | 8-1*01 | CAVIPDSNYQLIW | | | 5-8*01 | CASSSLGEQFF | 2239 |
| | | S5F | | | | | | | | | | | 2471 |
| CD10 | Neo⁺WT⁻ | AKAP13- | 0 | 0 | 0 | 0 | 38- | CAYYTPLVF | | | 6-2*01, | CASTDTGELFF | 2240 |
| | | Q8K | | | | | 2/DV8*01 | | | | 6-3*01 | | 2472 |
| CD11 | Neo⁺WT⁻ | GNL3L- | 0 | 0 | 0 | 0 | 22*01 | CAVRTSYDKVIF | | | 29-1*01 | CSVEGPGGRIAN | 2182 |
| | | R4C | | | | | | | | | | TEAFF | 2473 |
| CD2 | Neo⁺WT⁻ | GNL3L- | 0 | 0 | 0 | 0 | | | | | 27*01 | CASSLWAGETQY | 2384 |
| | | R4C | | | | | | | | | | F | |
| CD4 | Neo⁺WT⁻ | NSDHL- | 0 | 0 | 0 | 0 | | | | | 5-5*01 | CASSARGYDEQF | 2474 |
| | | A9V | | | | | | | | | | F | |
| CD5 | Neo⁺WT⁻ | GNL3L- | 0 | 0 | 0 | 0 | 22*01 | CAVDPNTGNQFYF | | | 20-1*01 | CSARASGAYEQY | 2241 |
| | | R4C | | | | | | | | | | F | 2475 |
| CD7 | Neo⁺WT⁻ | 0 | 0 | 0 | 0 | 0 | 12-2*01 | CAVNTGNQFYF | | | 6-5*01 | CASSYANGYEQY | 2242 |
| | | | | | | | | | | | | F | 2476 |
| CD8 | Neo⁺WT⁻ | GNL3L- | 0 | 0 | 0 | 0 | | | | | | | |
| | | R4C | | | | | | | | | | | |
| CD9 | Neo⁺WT⁻ | USP28- | 0 | 0 | 0 | 0 | 30*01 | CGTRGGSGNTPL | 35*01 | CAGQMYSGGG | 12-3*01, | CASTATFGVTEA | 2236 |
| | | CSF | | | | | | VF | | ADGLTF | 12-4*01 | FF | 2306 |
| | | | | | | | | | | | | | 2467 |
| CE1 | Neo⁺WT⁻ | 0 | 0 | 0 | 0 | 0 | | | | | 7-7*01 | CASSWGGGYEQ | 2477 |
| | | | | | | | | | | | | YF | |
| CE10 | Neo⁺WT⁻ | GNL3L- | 0 | 0 | 0 | 0 | 12-2*01 | CAVLLYGNKLVF | | | 6-1*01 | CASNQGLYEQYF | 2243 |
| | | R4C | | | | | | | | | | | 2478 |
| CE11 | Neo⁺WT⁻ | TEAD1- | 0 | 0 | 0 | 0 | 38- | CALTQGGSEKLVF | | | 19*01 | CASSIAQGGNQP | 2244 |
| | | L8F | | | | | 2/DV8*01 | | | | | QHF | 2479 |
| CE12 | Neo⁺WT⁻ | GNL3L- | 0 | 0 | 0 | 0 | | | | | | | |
| | | R4C | | | | | | | | | | | |
| CE2 | Neo⁺WT⁻ | GANAB- | 0 | 0 | 0 | 0 | 12-2*01 | CAVTTDSWGKLQF | | | 6-2*01, | CASSRQPMNTEA | 2245 |
| | | S5F | | | | | | | | | 6-3*01 | FF | 2480 |
| CE3 | Neo⁺WT⁻ | MLL2-L8H | 0 | 0 | 0 | 0 | | | | | 6-2*01, | CASSYSLEGYTF | 2481 |
| | | | | | | | | | | | 6-3*01 | | |
| CE4 | Neo⁺WT⁻ | SEC24A- | 0 | 0 | 0 | 0 | 26-1*01 | CIVRVDNARLMF | 26- | CIVRVRDSNYQ | 7-9*01 | | 2246 |
| | | PSL | | | | | | | 1*01 | LIW | | | 2307 |
| CE5 | Neo⁺WT⁻ | GNL3L- | 0 | 0 | 0 | 0 | 22*01 | CAVKTSYDKVIF | | | 20-1*01 | CSARVTSGSYEQ | 2199 |
| | | R4C | | | | | | | | | | YF | 2482 |
| CE6 | Neo⁺WT⁻ | 0 | 0 | 0 | 0 | 0 | | | | | | | |
| CE7 | Neo⁺WT⁻ | GANAB- | 0 | 0 | 0 | 0 | 14/DV4*01 | CAMREDAGGTSY | | | 29-1*01 | CSVGTYSNQPQH | 2247 |
| | | S5F | | | | | | GKLTF | | | | F | 2483 |
| CE9 | Neo⁺WT⁻ | GNL3L- | 0 | 0 | 0 | 0 | 12-2*01 | CAVGNSGGYQKV | | | 6-1*01 | CASSEGGYTEAF | 2248 |
| | | R4C | | | | | | TF | | | | F | 2484 |
| CF1 | Neo⁺WT⁻ | GNL3L- | 0 | 0 | 0 | 0 | | | | | 3-1*01 | CASSPGDGTEAF | 2485 |
| | | R4C | | | | | | | | | | F | |
| CF11 | Neo⁺WT⁻ | MRM1- | 0 | 0 | 0 | 0 | 24*01 | CAFSDGQKLLF | | | 7-9*01 | CASSLPPADMRD | 2249 |
| | | T6P | | | | | | | | | | TQYF | 2486 |
| CF12 | Neo⁺WT⁻ | GNL3L- | 0 | 0 | 0 | 0 | 22*01 | CAVKTSYDKVIF | | | 20-1*01 | CSSVTEAFF | 2199 |
| | | R4C | | | | | | | | | | | 2487 |
| CF2 | Neo⁺WT⁻ | WDR46- | 0 | 0 | 0 | 0 | 8-1*01 | CAVKMDSNYQLIW | | | 4-2*01 | CASSQDRGNEQF | 2250 |
| | | T3I | | | | | | | | | | F | 2488 |
| CF3 | Neo⁺WT⁻ | PGM5- | 0 | 0 | 0 | 0 | | | | | 20-1*01 | | |
| | | H5Y | | | | | | | | | | | |
| CF4 | Neo⁺WT⁻ | PABPC1- | 0 | 0 | 0 | 0 | | | | | 7-9*01 | CASSFGSGEQFF | 2489 |
| | | R5Q | | | | | | | | | | | |
| CF5 | Neo⁺WT⁻ | GANAB- | 0 | 0 | 0 | 0 | 12-2*01 | CAVTGSGYALNF | | | 4-3*01 | CASSQAHTGELF | 2251 |
| | | S5F | | | | | | | | | | F | 2490 |
| CF6 | Neo⁺WT⁻ | 0 | 0 | 0 | 0 | 0 | | | | | | | |
| CF7 | Neo⁺WT⁻ | GNL3L- | 0 | 0 | 0 | 0 | | | | | 4-3*01 | CASSQDRDSGYY | 2491 |
| | | R4C | | | | | | | | | | EQYF | |
| CF8 | Neo⁺WT⁻ | GNL3L- | 0 | 0 | 0 | 0 | 13-1*01 | CAATSNTGKLIF | 13- | CAAFSHTNAGK | 6-5*01 | CASSYSSGYFLF | 2252 |
| | | R4C | | | | | | | 1*01 | STF | | F | 2308 |
| | | | | | | | | | | | | | 2492 |
| CF9 | Neo⁺WT⁻ | GNL3L- | 0 | 0 | 0 | 0 | 12-1*01 | CVGMDSSYKLIF | | | 6-5*01 | CASSPSTGYGYT | 2253 |
| | | R4C | | | | | | | | | | F | 2493 |
| CG1 | Neo⁺WT⁻ | GANAB- | 0 | 0 | 0 | 0 | | | | | 19*01 | CASSTGNYGYTF | 2494 |
| | | S5F | | | | | | | | | | | |
| CG10 | Neo⁺WT⁻ | GNL3L- | 0 | 0 | 0 | 0 | | | | | | | |
| | | R4C | | | | | | | | | | | |
| CG11 | Neo⁺WT⁻ | GNL3L- | 0 | 0 | 0 | 0 | | | | | | | |
| | | R4C | | | | | | | | | | | |
| CG12 | Neo⁺WT⁻ | MRM1- | 0 | 0 | 0 | 0 | 21*01 | CAVRYYFGNEKLT | | | 5-1*01 | CASSLIQGAVDT | 2254 |
| | | T6P | | | | | | F | | | | QYF | 2495 |
| CG2 | Neo⁺WT⁻ | GNL3L- | 0 | 0 | 0 | 0 | 6*01 | CALQTGANNLFF | 14/DV | CAMIFNDYKLSF | 27*01 | CASSLWAGETQY | 2164 |
| | | R4C | | | | | | | 4*01 | | | F | 2261 |
| | | | | | | | | | | | | | 2384 |
| CG3 | Neo⁺WT⁻ | GNL3L- | 0 | 0 | 0 | 0 | | | | | 6-5*01 | CASSFGQGYEQY | 2496 |
| | | R4C | | | | | | | | | | F | |
| CG4 | Neo⁺WT⁻ | GANAB- | 0 | 0 | 0 | 0 | 21*01 | CAASGGGADGLTF | | | 6-5*01 | CASSPWTLNEQY | 2255 |
| | | S5F | | | | | | | | | | F | 2497 |
| CG5 | Neo⁺WT⁻ | PABPC1- | 0 | 0 | 0 | 0 | 12-2*01 | CAVIPRGGSNYKL | | | 6-2*01, | CASSYGNTGELF | 2256 |
| | | R5Q | | | | | | TF | | | 6-3*01 | F | 2498 |
| CG7 | Neo⁺WT⁻ | GNL3L- | 0 | 0 | 0 | 0 | 13-1*01 | CAYGGGTYKYIF | | | 6-2*01, | CASSYSDRSSYE | 2257 |
| | | R4C | | | | | | | | | 6-3*01 | QYF | 2499 |
| CG8 | Neo⁺WT⁻ | GNL3L- | 0 | 0 | 0 | 0 | 12-2*01 | CAVMTGGFKTIF | | | 6-5*01 | CASSYGGGYEQY | 2258 |
| | | R4C | | | | | | | | | | F | 2500 |
| CG9 | Neo⁺WT⁻ | PGM5- | 0 | 0 | 0 | 0 | | | | | | | |
| | | H5Y | | | | | | | | | | | |
| CH12 | Neo⁺WT⁻ | USP28- | 0 | 0 | 0 | 0 | 19*01 | CALTQSGGYQKVT | | | 2*01 | CASREGLEDTEA | 2259 |
| | | C5F | | | | | | F | | | | FF | 2501 |
| CH7 | Neo⁺WT⁻ | PGM5- | 0 | 0 | 0 | 0 | 19*01 | CALGDYKLSF | | | 13*01 | CASTEGQGGEQ | 2260 |
| | | H5Y | | | | | | | | | | YF | 2502 |
| CH9 | Neo⁺WT⁻ | GNL3L- | 0 | 0 | 0 | 0 | | | | | 29-1*01 | CSPGDGYTF | 2503 |
| | | R4C | | | | | | | | | | | |
| AG1 | Spike-In | HCV-KLV | 0 | 0 | 0 | 0 | 14/DV4*01 | CAMIFNDYKLSF | | | 19*01 | CASSTGNYGYTF | 2261 |
| | Clone | | | | | | | | | | | | 2494 |
| AG10 | Spike-In | HCV-KLV | 0 | 0 | 0 | 0 | 14/DV4*01 | CAMIFNDYKLSF | | | 19*01 | CASSTGNYGYTF | 2261 |
| | Clone | | | | | | | | | | | | 2494 |
| AG11 | Spike-In | HCV-KLV | 0 | 0 | 0 | 0 | 14/DV4*01 | CAMIFNDYKLSF | | | 19*01 | CASSTGNYGYTF | 2261 |
| | Clone | | | | | | | | | | | | 2494 |
| AG12 | Spike-In | HCV-KLV | 0 | 0 | 0 | 0 | 14/DV4*01 | CAMIFNDYKLSF | | | 19*01 | CASSTGNYGYTF | 2261 |
| | Clone | | | | | | | | | | | | 2494 |
| AG2 | Spike-In | HCV-KLV | 0 | 0 | 0 | 0 | 14/DV4*01 | CAMIFNDYKLSF | | | 19*01 | CASSTGNYGYTF | 2261 |
| | Clone | | | | | | | | | | | | 2494 |
| AG3 | Spike-In | HCV-KLV | 0 | 0 | 0 | 0 | 14/DV4*01 | CAMIFNDYKLSF | | | 19*01 | CASSTGNYGYTF | 2261 |
| | Clone | | | | | | | | | | | | 2494 |
| AG4 | Spike-In | HCV-KLV | 0 | 0 | 0 | 0 | 14/DV4*01 | CAMIFNDYKLSF | | | 19*01 | CASSTGNYGYTF | 2261 |
| | Clone | | | | | | | | | | | | 2494 |
| AG5 | Spike-In | HCV-KLV | 0 | 0 | 0 | 0 | 14/DV4*01 | CAMIFNDYKLSF | | | 19*01 | CASSTGNYGYTF | 2261 |
| | Clone | | | | | | | | | | | | 2494 |
| AG6 | Spike-In | HCV-KLV | 0 | 0 | 0 | 0 | 14/DV4*01 | CAMIFNDYKLSF | | | 19*01 | CASSTGNYGYTF | 2261 |
| | Clone | | | | | | | | | | | | 2494 |
| AG7 | Spike-In | HCV-KLV | 0 | 0 | 0 | 0 | 14/DV4*01 | CAMIFNDYKLSF | | | 19*01 | CASSTGNYGYTF | 2261 |
| | Clone | | | | | | | | | | | | 2494 |
| AG8 | Spike-In | HCV-KLV | 0 | 0 | 0 | 0 | 14/DV4*01 | CAMIFNDYKLSF | | | 19*01 | CASSTGNYGYTF | 2261 |
| | Clone | | | | | | | | | | | | 2494 |
| AG9 | Spike-In | HCV-KLV | 0 | 0 | 0 | 0 | 14/DV4*01 | CAMIFNDYKLSF | | | 19*01 | CASSTGNYGYTF | 2261 |
| | Clone | | | | | | | | | | | | 2494 |
| BA12 | Neo⁻WT⁺ | ERBB2 | 0 | 0 | 0 | 0 | 8-4*01 | CAVSDLNSGGYQ | | | 18*01 | CASSPRDRVHEQ | 2262 |
| | | | | | | | | KVTF | | | | YF | 2504 |
| BA4 | Neo⁻WT⁺ | GANAB | 0 | 0 | 0 | 0 | 12-2*01 | CAVNNARLMF | | | 4-3*01 | CASSQGGGGTD | 2263 |
| | | | | | | | | | | | | TQYF | 2505 |
| BA5 | Neo⁻WT⁺ | MRM1 | 0 | 0 | 0 | 0 | 12-2*01 | CAVNNARLMF | | | 4-1*01 | CASSPSPGSEQY | 2263 |
| | | | | | | | | | | | | F | 2506 |
| BA7 | Neo⁻WT⁺ | GANAB | 0 | 0 | 0 | 0 | 12-2*01 | CAIEGGKLIF | | | 2*01 | CASSDWGGETQ | 2264 |
| | | | | | | | | | | | | YF | 2507 |
| BB2 | Neo⁻WT⁺ | GANAB | 0 | 0 | 0 | 0 | 12-2*01 | CAVNNARLMF | | | 4-3*01 | CASSQGGGGTD | 2263 |
| | | | | | | | | | | | | TQYF | 2505 |
| BB3 | Neo⁻WT⁺ | GANAB | 0 | 0 | 0 | 0 | 12-3*01 | CAMKDFGNEKLTF | | | 2*01 | CSWDFQETQYF | 2265 |
| | | | | | | | | | | | | | 2508 |
| BB4 | Neo⁻WT⁺ | TEAD1- | 0 | 0 | 0 | 0 | 12-2*01 | CAVITGTALIF | | | 2*01 | CASSENTGELFF | 2266 |
| | | (SVL) | | | | | | | | | | | 2509 |
| BB5 | Neo⁻WT⁺ | GANAB | 0 | 0 | 0 | 0 | 12-2*01 | CAVNNARLMF | | | | | 2263 |
| BB9 | Neo⁻WT⁺ | FNDC3B | 0 | 0 | 0 | 0 | | | | | | | |
| BC3 | Neo⁻WT⁺ | FNDC3B | 0 | 0 | 0 | 0 | 14/DV4*01 | CAMREFNAGGTS | | | 20-1*01 | CSGLVPGFDSPL | 2267 |
| | | | | | | | | YGKLTF | | | | HF | 2510 |
| BC6 | Neo⁻WT⁺ | FNDC3B | 0 | 0 | 0 | 0 | 14/DV4*01 | CAMRETWGGLGG | 12- | CVVISTDSWGK | 9*01 | CASSVETGGLDT | 2268 |
| | | | | | | | | SQGNLIF | 1*01 | FQF | | QYF | 2309 |
| | | | | | | | | | | | | | 2375 |
| BC7 | Neo⁻WT⁺ | PGM5 | 0 | 0 | 0 | 0 | | | | | 9*01 | CASSVDGGPQET | 2511 |
| | | | | | | | | | | | | QYF | |
| BD4 | Neo⁻WT⁺ | FNDC3B | 0 | 0 | 0 | 0 | 12-2*01 | CAVYTGGFKTIF | | | 12-3*01, | CASSFGGSSYEQ | 2269 |
| | | | | | | | | | | | 12-4*01 | YF | 2512 |
| BD6 | Neo⁻WT⁺ | WDR46 | 0 | 0 | 0 | 0 | 12-2*01 | CAVPVLGGSQGNL | | | | | 2270 |
| | | | | | | | | IF | | | | | |
| BD7 | Neo⁻WT⁺ | SEC24A | 0 | 0 | 0 | 0 | | | | | 9*01 | CASSVGTSSYGY | 2513 |
| | | | | | | | | | | | | TF | |
| BD9 | Neo⁻WT⁺ | MLL2 | 0 | 0 | 0 | 0 | 17*01 | CATDANTGNQFYF | | | 19*01 | CASSLGTLNEQF | 2271 |
| | | | | | | | | | | | | F | 2514 |
| BE11 | Neo⁻WT⁺ | SEC24A | 0 | 0 | 0 | 0 | 22*01 | CALLSNQAGTALIF | | | 28*01 | CASSNARGYGYT | 2272 |
| | | | | | | | | | | | | F | 2515 |
| BE2 | Neo⁻WT⁺ | USP28 | 0 | 0 | 0 | 0 | 8-3*01 | CAVGDAGGATNKL | | | 7-2*01 | CASSWWLNTEAF | 2273 |
| | | | | | | | | IF | | | | F | 2516 |
| BE4 | Neo⁻WT⁺ | GANAB | 0 | 0 | 0 | 0 | 12-2*01 | CAVNNARLMF | | | | | 2263 |
| BE6 | Neo⁻WT⁺ | SEC24A | 0 | 0 | 0 | 0 | | | | | 5-6*01 | CASSPAGSNYGY | 2517 |
| | | | | | | | | | | | | TF | |
| BE7 | Neo⁻WT⁺ | MRM1 | 0 | 0 | 0 | 0 | 9-2*01 | CALSEPIYNFNKFY | | | 11-2*01 | CASSLGAEQYF | 2274 |
| | | | | | | | | F | | | | | 2518 |
| BE8 | Neo⁻WT⁺ | SEC24A | 0 | 0 | 0 | 0 | 22*01 F | CAVEDLGFGNVLH | | | 28*01 | CASSPGLYTQYF | 2275 |
| | | | | | | | | C | | | | | 2519 |
| BF1 | Neo⁻WT⁺ | SEC24A | 0 | 0 | 0 | 0 | | | | | | | |
| BF10 | Neo⁻WT⁺ | GANAB | 0 | 0 | 0 | 0 | 12-2*01 | CAVNPGGFKTIF | | | 6-2*01, | CASSYSSGTEAF | 2276 |
| | | | | | | | | | | | 6-3*01 | F | 2520 |
| BF2 | Neo⁻WT⁺ | GANAB | 0 | 0 | 0 | 0 | 12-2*01 | CAVSPGGFKTIF | | | | | 2277 |
| BF4 | Neo⁻WT⁺ | SEC24A | 0 | 0 | 0 | 0 | 5*01 | CAERDQAGTALIF | 17*01 | CATDVYDYKLS | 7-2*01 | CASSLREAGELF | 2278 |
| | | | | | | | | | | F | | F | 2310 |
| | | | | | | | | | | | | | 2521 |
| BF6 | Neo⁻WT⁺ | SEC24A | 0 | 0 | 0 | 0 | 8-3*01 | CAVGYNTDKLIF | | | 7-6*01 | CASSLGNTEAFF | 2279 |
| | | | | | | | | | | | | | 2522 |
| BF7 | Neo⁻WT⁺ | FNDC3B | 0 | 0 | 0 | 0 | 1-2*01 | CAVRGSARQLTF | | | 2*01 | CASSEVQGGRDT | 2280 |
| | | | | | | | | | | | | QYF | 2523 |
| BF8 | Neo⁻WT⁺ | SEC24A | 0 | 0 | 0 | 0 | 12-3*01 | CAMDKMDSNYQLI | | | 27*01 | CASSFGIGPQYF | 2281 |
| | | | | | | | | W | | | | | 2524 |
| BG3 | Neo⁻WT⁺ | WDR46 | 0 | 0 | 0 | 0 | 14/DV4*01 | CAMRESKAAGNKL | | | 7-2*01 | CASSLWGQGWT | 2282 |
| | | | | | | | | TF | | | | GELFF | 2525 |
| BG4 | Neo⁻WT⁺ | COL18A1 | 0 | 0 | 0 | 0 | 23/DV6*01 | CAASLNTNAGKST | | | 30*01 | CAWSVGNYGYTF | 2283 |
| | | | | | | | | F | | | | | 2526 |
| BG6 | Neo⁻WT⁺ | FNDC3B | 0 | 0 | 0 | 0 | 14/DV4*01 | CAMRESSYGNNR | | | 5-8*01 | CASSRPLNQPQH | 2284 |
| | | | | | | | | LAF | | | | F | 2527 |
| BG8 | Neo⁻WT⁺ | WDR46 | 0 | 0 | 0 | 0 | 12-2*01 | CAVNMEGAGSYQ | | | 9*01 | CASSVESGEQYF | 2285 |
| | | | | | | | | LTF | | | | | 2528 |
| BH12 | Neo⁻WT⁺ | GANAB | 0 | 0 | 0 | 0 | 12-2*01 | CAVNNARLMF | | | | | 2263 |
| BH3 | Neo⁻WT⁺ | SNX24 | 0 | 0 | 0 | 0 | 13-2*01 | CAENKDDYKLSF | | | 7-8*01 | CASSFSATGELFF | 2286 |
| | | | | | | | | | | | | | 2529 |
| BH4 | Neo⁻WT⁺ | GANAB | 0 | 0 | 0 | 0 | 12-2*01 | CAVNNARLMF | | | | | 2263 |
| CB9 | Neo⁻WT⁺ | PGM5 | 0 | 0 | 0 | 0 | 35*01 | CAGAEISGGGADG | 9-2*01 | CAPPIEGGSEKL | 3-1*01 | CASSLAYEQYF | 2287 |
| | | | | | | | | LTF | | VF | | | 2311 |
| | | | | | | | | | | | | | 2530 |
| CC5 | Neo-WT⁺ | WDR46 | 0 | 0 | 0 | 0 | | | | | 4-1*01 | CASSFGANTGEL | 2531 |
| | | | | | | | | | | | | FF | |
| CC8 | Neo⁻WT⁺ | SEC24A | 0 | 0 | 0 | 0 | | | | | | | |
| CD6 | Neo⁻WT⁺ | GANAB | 0 | 0 | 0 | 0 | 12-2*01 | CAVNNARLMF | | | 4-3*01 | CASSQGGGGTD | 2563 |
| | | | | | | | | | | | | TQYF | 2505 |
| CH11 | Neo⁻WT⁺ | GANAB | 0 | 0 | 0 | 0 | 12-2*01 | CAVNNARLMF | | | 4-3*01 | CASSQGGGGTD | 2263 |
| | | | | | | | | | | | | TQYF | 2505 |
| CH4 | Neo⁻WT⁺ | SEC24A | 0 | 0 | 0 | 0 | 14/DV4*01 | CAMREFYSGGGA | | | 2*01 | CASSEDRGNSPL | 2288 |
| | | | | | | | | DGLTF | | | | HF | 2532 |
| CH5 | Neo⁻WT⁺ | GANAB | 0 | 0 | 0 | 0 | 12-2*01 | CAVNNARLMF | | | 4-3*01 | CASSQGGGGTD | 2263 |
| | | | | | | | | | | | | TQYF | 2505 |

TABLE 7
TetTCR summary for experiment 4.

| Cell | Sorted | Detected Peptide by MID Count | | | | | TCRα, 1 | | TCRα, 2 | | TCRβ | | SEQ ID NO |
|---|---|---|---|---|---|---|---|---|---|---|---|---|---|
| Name | Population | Rank 1 | Rank 2 | Rank 3 | Rank 4 | Rank 5 | TRAV | CDR3α | TRAV | CDR3α | TRBV | CDR3β | (L to R) |
| G23 | Neo⁺WT⁺ | 0 | 0 | 0 | 0 | 0 | | | | | | | |
| G6 | Neo⁺WT⁺ | 0 | 0 | 0 | 0 | 0 | | | | | 15*01 | CATSQMGDT | 2615 |
| | | | | | | | | | | | | QYF | |
| H10 | Neo⁺WT⁺ | 0 | 0 | 0 | 0 | 0 | 3*01 | CAVGFYGNN | | | | | 2533 |
| | | | | | | | | RLAF | | | | | |
| H9 | Neo⁺WT⁺ | 0 | 0 | 0 | 0 | 0 | | | | | 6-2*01, | CASSPFGDM | 2616 |
| | | | | | | | | | | | 6-3*01 | LYNEQFF | |
| I12 | Neo⁺WT⁺ | 0 | 0 | 0 | 0 | 0 | 12-2*01 | CAVRNNDMR | | | | | 2534 |
| | | | | | | | | F | | | | | |
| I15 | Neo⁺WT⁺ | 0 | 0 | 0 | 0 | 0 | | | | | 30*01 | CAARPASYE | 2617 |
| | | | | | | | | | | | | QYF | |
| J5 | Neo⁺WT⁺ | 0 | 0 | 0 | 0 | 0 | | | | | 12-3*01, | CASSSSGRA | 2618 |
| | | | | | | | | | | | 12-4*01 | SADTQYF | |
| K5 | Neo⁺WT⁺ | 0 | 0 | 0 | 0 | 0 | | | | | | | |
| L13 | Neo⁺WT⁺ | 0 | 0 | 0 | 0 | 0 | | | | | | | |
| L6 | Neo⁺WT⁺ | 0 | 0 | 0 | 0 | 0 | 19*01 | CALSEALAY | | | | | 2535 |
| | | | | | | | | NQGGKLIF | | | | | |
| M3 | Neo⁺WT⁺ | 0 | 0 | 0 | 0 | 0 | 10*01 | CVVSGGYNK | | | 4-2*01 | CASSPNARLA | 2536 2619 |
| | | | | | | | | LIF | | | | GAGGTDTQYF | |
| M7 | Neo⁺WT⁺ | 0 | 0 | 0 | 0 | 0 | | | | | 5-6*01 | CASSLAPKT | 2620 |
| | | | | | | | | | | | | AFSYEQYF | |
| O1 | Neo⁺WT⁺ | 0 | 0 | 0 | 0 | 0 | 14/DV4*01 | CAMRDPFTG | | | 20-1*01 | CSARSWTPQ | 2537 2621 |
| | | | | | | | | NQFYF | | | | ETQYF | |
| H23 | Neo⁺WT⁺ | AKAP13 | 0 | 0 | 0 | 0 | | | | | | | |
| H4 | Neo⁺WT⁺ | AKAP13 | AKAP13_Q8K | 0 | 0 | 0 | | | | | | | |
| K2 | Neo⁺WT⁺ | AKAP13 | AKAP13_Q8K | SNX24 | 0 | 0 | | | | | 29-1*01 | CSVEGLRGG | 2622 |
| | | | | | | | | | | | | NEQFF | |
| G2 | Neo⁺WT⁺ | AKAP13_Q8K | AKAP13 | 0 | 0 | 0 | | | | | | | |
| I1 | Neo⁺WT⁺ | COL18A1 | COL18A1_S8F | 0 | 0 | 0 | 16*01 | CALRGYSTL | | | | | 2538 |
| | | | | | | | | TF | | | | | |
| K12 | Neo⁺WT⁺ | COL18A1 | COL18A1_S8F | 0 | 0 | 0 | | | | | | | |
| G12 | Neo⁺WT⁺ | FNDC3B | FNDC3B_L3M | 0 | 0 | 0 | | | | | | | |
| G14 | Neo⁺WT⁺ | FNDC3B | FNDC3B_L3M | 0 | 0 | 0 | 14/DV4*01 | CAMRELGGS | | | | | 2539 |
| | | | | | | | | NYKLTF | | | | | |
| G18 | Neo⁺WT⁺ | FNDC3B | FNDC3B_L3M | 0 | 0 | 0 | | | | | 13*01 | CASSLGGLT | 2623 |
| | | | | | | | | | | | | DTQYF | |
| G19 | Neo⁺WT⁺ | FNDC3B | FNDC3B_L3M | 0 | 0 | 0 | | | | | | | |
| G24 | Neo⁺WT⁺ | FNDC3B | FNDC3B_L3M | 0 | 0 | 0 | | | | | | | |
| G3 | Neo⁺WT⁺ | FNDC3B | 0 | 0 | 0 | 0 | | | | | 30*01 | CAWSAGEQY | 2624 |
| | | | | | | | | | | | | F | |
| G7 | Neo⁺WT⁺ | FNDC3B | USP28_C5F | 0 | 0 | 0 | 19*01 | CALSETDTG | | | | | 2540 |
| | | | | | | | | RRALTF | | | | | |
| H11 | Neo⁺WT⁺ | FNDC3B | FNDC3B_L3M | 0 | 0 | 0 | | | | | | | |
| H2 | Neo⁺WT⁺ | FNDC3B | FNDC3B_L3M | 0 | 0 | 0 | | | | | | | |
| H8 | Neo⁺WT⁺ | FNDC3B | FNDC3B_L3M | 0 | 0 | 0 | | | | | | | |
| I13 | Neo⁺WT⁺ | FNDC3B | FNDC3B_L3M | 0 | 0 | 0 | | | | | | | |
| I14 | Neo⁺WT⁺ | FNDC3B | FNDC3B_L3M | 0 | 0 | 0 | 14/DV4*01 | CAMREFAGA | | | | | 2541 |
| | | | | | | | | NSKLTF | | | | | |
| I18 | Neo⁺WT⁺ | FNDC3B | FNDC3B_L3M | 0 | 0 | 0 | | | | | 6-5*01 | CASSYGGGS | 2625 |
| | | | | | | | | | | | | PQYF | |
| I20 | Neo⁺WT⁺ | FNDC3B | FNDC3B_L3M | 0 | 0 | 0 | | | | | | | |
| I6 | Neo⁺WT⁺ | FNDC3B | FNDC3B_L3M | 0 | 0 | 0 | 12-2*01 | CAVNNARLM | | | | | 2542 |
| | | | | | | | | F | | | | | |
| J1 | Neo⁺WT⁺ | FNDC3B | FNDC3B_L3M | 0 | 0 | 0 | | | | | 5-4*01 | CASSWTGN | 2626 |
| | | | | | | | | | | | | TEAFF | |
| J12 | Neo⁺WT⁺ | FNDC3B | FNDC3B_L3M | 0 | 0 | 0 | | | | | | | |
| J17 | Neo⁺WT⁺ | FNDC3B | FNDC3B_L3M | 0 | 0 | 0 | | | | | | | |
| K19 | Neo⁺WT⁺ | FNDC3B | FNDC3B_L3M | 0 | 0 | 0 | | | | | | | |
| K3 | Neo⁺WT⁺ | FNDC3B | FNDC3B_L3M | 0 | 0 | 0 | | | | | | | |
| L1 | Neo⁺WT⁺ | FNDC3B | FNDC3B_L3M | 0 | 0 | 0 | 29/DV5*01 | CAASGQGGT | | | | | 2543 |
| | | | | | | | | SYGKLTF | | | | | |
| L11 | Neo⁺WT⁺ | FNDC3B | FNDC3B_L3M | 0 | 0 | 0 | 29/DV5*01 | CAASGGNSG | | | 13*01 | CASSPLRGPY | 2544 2627 |
| | | | | | | | | YALNF | | | | EQYF | |
| L2 | Neo⁺WT⁺ | FNDC3B | FNDC3B_L3M | 0 | 0 | 0 | | | | | | | |
| M2 | Neo⁺WT⁺ | FNDC3B | FNDC3B_L3M | 0 | 0 | 0 | | | | | 20-1*01 | CSATPRYRG | 2628 |
| | | | | | | | | | | | | YEQYF | |
| M4 | Neo⁺WT⁺ | FNDC3B | FNDC3B_L3M | 0 | 0 | 0 | 12-1*01 | CVVRGSQGN | | | | | 2545 |
| | | | | | | | | LIF | | | | | |
| N8 | Neo⁺WT⁺ | FNDC3B | FNDC3B_L3M | 0 | 0 | 0 | | | | | | | |
| K1 | Neo⁺WT⁺ | FNDC3B_L3M | TEAD1_L8F | FNDC3B | TEAD1_(VLE) | 0 | | | | | 3-1*01 | CASAGPGRN | 2629 |
| | | | | | | | | | | | | QPQHF | |
| M11 | Neo⁺WT⁺ | GANAB | GANAB_S5F | 0 | 0 | 0 | 29/DV5*01 | CAASALSGA | | | 4-2*01 | CASSQGSGAN | 2546 2630 |
| | | | | | | | | NSKLTF | | | | VLTF | |
| G17 | Neo⁺WT⁺ | MLL2 | MLL2_L8H | 0 | 0 | 0 | | | | | | | |
| G9 | Neo⁺WT⁺ | MLL2 | 0 | 0 | 0 | 0 | | | | | 7-9*01 | CASYPISRA | 2631 |
| | | | | | | | | | | | | SYEQYF | |
| H12 | Neo⁺WT⁺ | MLL2 | MLL2_L8H | 0 | 0 | 0 | | | | | | | |
| N2 | Neo⁺WT⁺ | MLL2 | MLL2_L8H | 0 | 0 | 0 | | | | | | | |
| G20 | Neo⁺WT⁺ | MRM1 | NSDHL | NSDHL_A9V | USP28 | 0 | | | | | | | |
| J20 | Neo⁺WT⁺ | MRM1 | NSDHL | NSDHL_A9V | 0 | 0 | | | | | 4-1*01 | CASSQDQNT | 2632 |
| | | | | | | | | | | | | EAFF | |
| H1 | Neo⁺WT⁺ | NSDHL | NSDHL_A9V | MRM1 | 0 | 0 | | | | | | | |
| H16 | Neo⁺WT⁺ | NSDHL | NSDHL_A9V | 0 | 0 | 0 | | | | | | | |
| H20 | Neo⁺WT⁺ | NSDHL | NSDHL_A9V | 0 | 0 | 0 | | | | | | | |
| H3 | Neo⁺WT⁺ | NSDHL | NSDHL_A9V | 0 | 0 | 0 | | | | | 7-9*01 | CASSGQGHP | 2633 |
| | | | | | | | | | | | | YNEQFF | |
| H7 | Neo⁺WT⁺ | NSDHL | NSDHL_A9V | 0 | 0 | 0 | | | | | | | |
| I16 | Neo⁺WT⁺ | NSDHL | NSDHL_A9V | 0 | 0 | 0 | | | | | | | |
| I17 | Neo⁺WT⁺ | NSDHL | NSDHL_A9V | 0 | 0 | 0 | | | | | | | |
| I19 | Neo⁺WT⁺ | NSDHL | NSDHL_A9V | 0 | 0 | 0 | | | | | | | |
| I2 | Neo⁺WT⁺ | NSDHL | NSDHL_A9V | 0 | 0 | 0 | | | | | | | |
| I22 | Neo⁺WT⁺ | NSDHL | NSDHL_A9V | 0 | 0 | 0 | | | | | | | |
| I24 | Neo⁺WT⁺ | NSDHL | NSDHL_A9V | 0 | 0 | 0 | | | | | | | |
| I3 | Neo⁺WT⁺ | NSDHL | NSDHL_A9V | 0 | 0 | 0 | 3*01 | CAVRETNPK | | | | | 2547 |
| | | | | | | | | GKLIF | | | | | |
| I5 | Neo⁺WT⁺ | NSDHL | NSDHL_A9V | 0 | 0 | 0 | | | | | | | |
| J10 | Neo⁺WT⁺ | NSDHL | NSDHL_A9V | 0 | 0 | 0 | | | | | | | |
| J21 | Neo⁺WT⁺ | NSDHL | NSDHL_A9V | 0 | 0 | 0 | | | | | | | |
| J24 | Neo⁺WT⁺ | NSDHL | NSDHL_A9V | 0 | 0 | 0 | | | | | | | |
| J8 | Neo⁺WT⁺ | NSDHL | NSDHL_A9V | 0 | 0 | 0 | 9-2*01 | CALSEVNRD | | | 7-9*01 | CASSPMGQSY | 2548 2634 |
| | | | | | | | | DKIIF | | | | EQYF | |
| J9 | Neo⁺WT⁺ | NSDHL | NSDHL_A9V | 0 | 0 | 0 | | | | | | | |
| K10 | Neo⁺WT⁺ | NSDHL | NSDHL_A9V | 0 | 0 | 0 | | | | | | | |
| K11 | Neo⁺WT⁺ | NSDHL | NSDHL_A9V | 0 | 0 | 0 | 14/DV4*01 | CAMRELDGQ | | | 9*01 | CASSTGGTSG | 2549 2635 |
| | | | | | | | | KLLF | | | | GRNTGELFF | |
| K13 | Neo⁺WT⁺ | NSDHL | NSDHL_A9V | 0 | 0 | 0 | | | | | | | |
| K17 | Neo⁺WT⁺ | NSDHL | NSDHL_A9V | 0 | 0 | 0 | | | | | | | |
| K4 | Neo⁺WT⁺ | NSDHL | NSDHL_A9V | 0 | 0 | 0 | | | | | | | |
| L15 | Neo⁺WT⁺ | NSDHL | NSDHL_A9V | 0 | 0 | 0 | | | | | | | |
| L5 | Neo⁺WT⁺ | NSDHL | NSDHL_A9V | 0 | 0 | 0 | | | | | | | |
| L8 | Neo⁺WT⁺ | NSDHL | NSDHL_A9V | 0 | 0 | 0 | | | | | 20-1*01 | CSARGDPNY | 2636 |
| | | | | | | | | | | | | EQYF | |
| M1 | Neo⁺WT⁺ | NSDHL | NSDHL_A9V | 0 | 0 | 0 | | | | | | | |
| M10 | Neo⁺WT⁺ | NSDHL | NSDHL_A9V | 0 | 0 | 0 | 19*01 | CALSEANYG | | | 4-1*01 | CASSPRAYNE | 2550 2637 |
| | | | | | | | | GSQGNLIF | | | | QFF | |
| N1 | Neo⁺WT⁺ | NSDHL | NSDHL_A9V | 0 | 0 | 0 | 1-2*01 | CAVRGLTGA | | | | | 2551 |
| | | | | | | | | NNLFF | | | | | |
| G22 | Neo⁺WT⁺ | NSDHL_A9V | NSDHL | 0 | 0 | 0 | 38-1*01 | CAFMMDNNN | | | 9*01 | CASSGQGGDE | 2552 2638 |
| | | | | | | | | DMRF | | | | QYF | |
| H14 | Neo⁺WT⁺ | NSDHL_A9V | NSDHL | 0 | 0 | 0 | 10*01 | CVVTPTDSW | | | | | 2553 |
| | | | | | | | | GKLQF | | | | | |
| H17 | Neo⁺WT⁺ | NSDHL_A9V | NSDHL | 0 | 0 | 0 | 9-2*01 | CALSEGQTG | | | 9*01 | CASSVGGGSS | 2554 2639 |
| | | | | | | | | ANNLFF | | | | YEQYF | |
| H6 | Neo⁺WT⁺ | NSDHL_A9V | NSDHL | 0 | 0 | 0 | | | | | | | |
| I7 | Neo⁺WT⁺ | NSDHL_A9V | NSDHL | 0 | 0 | 0 | | | | | | | |
| I8 | Neo⁺WT⁺ | NSDHL_A9V | NSDHL | 0 | 0 | 0 | 5*01 | CAESRPEYG | | | | | 2555 |
| | | | | | | | | NKLVF | | | | | |
| I9 | Neo⁺WT⁺ | NSDHL_A9V | NSDHL | 0 | 0 | 0 | 14/DV4*01 | CAMRAYSGG | | | 9*01 | CASSVASGGY | 2556 2640 |
| | | | | | | | | GADGLTF | | | | TDTQYF | |
| J13 | Neo⁺WT⁺ | NSDHL_A9V | NSDHL | 0 | 0 | 0 | | | | | | | |
| J19 | Neo⁺WT⁺ | NSDHL_A9V | NSDHL | 0 | 0 | 0 | | | | | | | |
| J23 | Neo⁺WT⁺ | NSDHL_A9V | NSDHL | 0 | 0 | 0 | 24*01 | CAPPGAQKL | | | | | 2557 |
| | | | | | | | | VF | | | | | |
| K15 | Neo⁺WT⁺ | NSDHL_A9V | NSDHL | 0 | 0 | 0 | 12-3*01 | CAMTITGNQ | | | | | 2558 |
| | | | | | | | | FYF | | | | | |
| N3 | Neo⁺WT⁺ | NSDHL_A9V | NSDHL | 0 | 0 | 0 | | | | | | | |
| N7 | Neo⁺WT⁺ | NSDHL_A9V | NSDHL | 0 | 0 | 0 | | | | | 28*01 | CASSRSRWE | 2641 |
| | | | | | | | | | | | | FYGYTF | |
| O2 | Neo⁺WT⁺ | NSDHL_A9V | NSDHL | 0 | 0 | 0 | 19*01 | CALSEAGSG | | | 9*01 | CASNRGYNEQ | 2559 2642 |
| | | | | | | | | NTPLVF | | | | FF | |
| I11 | Neo⁺WT⁺ | PGM5 | PGM5_H5Y | 0 | 0 | 0 | 16*01 | CALIRNSGN | | | | | 2560 |
| | | | | | | | | TPLVF | | | | | |
| J16 | Neo⁺WT⁺ | PGM5 | PGM5_H5Y | 0 | 0 | 0 | | | | | | | |
| K8 | Neo⁺WT⁺ | PGM5 | PGM5_H5Y | 0 | 0 | 0 | 17*01 | CATEDYNTD | | | | | 2561 |
| | | | | | | | | KLIF | | | | | |
| I23 | Neo⁺WT⁺ | PGM5_H5Y | PGM5 | 0 | 0 | 0 | | | | | | | |
| G15 | Neo⁺WT⁺ | SEC24A | SEC24A_P5L | 0 | 0 | 0 | | | | | 4-3*01 | CASSQAERG | 2643 |
| | | | | | | | | | | | | ESYNEQFF | |
| G16 | Neo⁺WT⁺ | SMARCD3 | SMARCD3_H8Y | 0 | 0 | 0 | | | | | | | |
| J4 | Neo⁺WT⁺ | SMARCD3 | SMARCD3_H8Y | 0 | 0 | 0 | | | | | 27*01 | CASSLGGNP | 2644 |
| | | | | | | | | | | | | TYNEQFF | |
| L12 | Neo⁺WT⁺ | SMARCD3 | SMARCD3_H8Y | 0 | 0 | 0 | | | | | | | |
| H24 | Neo⁺WT⁺ | SNX24 | SNX24_P6L | 0 | 0 | 0 | | | | | | | |
| O4 | Neo⁺WT⁺ | TEAD1_(SVL) | TEAD1_L9F | 0 | 0 | 0 | | | | | 2*01 | CASRIPDRN | 2645 |
| | | | | | | | | | | | | EQFF | |
| H5 | Neo⁺WT⁺ | TEAD1_(VLE) | MAGEA12_KMAE | 0 | 0 | 0 | | | | | | | |
| G21 | Neo⁺WT⁺ | WDR46 | WDR46_T3I | 0 | 0 | 0 | 14/DV4*01 | CAMRELNFN | | | | | 2562 |
| | | | | | | | | KFYF | | | | | |
| A5 | Neo⁺WT⁻ | AKAP13_Q8K | 0 | 0 | 0 | 0 | | | | | 30*01 | CAWSAGGTG | 2646 |
| | | | | | | | | | | | | ELFF | |
| B10 | Neo⁺WT⁻ | AKAP13_Q8K | 0 | 0 | 0 | 0 | | | | | | | |
| B14 | Neo⁺WT⁻ | AKAP13_Q8K | 0 | 0 | 0 | 0 | 38-2/DV8*01 | CAYHDNNDM | | | | | 2563 |
| | | | | | | | | RF | | | | | |
| D13 | Neo⁺WT⁻ | AKAP13_Q8K | 0 | 0 | 0 | 0 | | | | | 30*01 | CAWMGSYNE | 2647 |
| | | | | | | | | | | | | QFF | |
| E4 | Neo⁺WT⁻ | AKAP13_Q8K | 0 | 0 | 0 | 0 | 29/DV5*01 | CAASAMDSS | | | | | 2564 |
| | | | | | | | | YKLIF | | | | | |
| F11 | Neo⁺WT⁻ | AKAP13_Q8K | 0 | 0 | 0 | 0 | | | | | | | |
| F19 | Neo⁺WT⁻ | AKAP13_Q8K | 0 | 0 | 0 | 0 | | | | | | | |
| E6 | Neo⁺WT⁻ | ERBB2_H8Y | 0 | 0 | 0 | 0 | | | | | | | |
| E12 | Neo⁺WT⁻ | FNDC3B_L3M | 0 | 0 | 0 | 0 | | | | | 7-6*01 | CASSLQGSY | 2648 |
| | | | | | | | | | | | | EQYF | |
| A18 | Neo⁺WT⁻ | GANAB_S5F | 0 | 0 | 0 | 0 | | | | | | | |
| A21 | Neo⁺WT⁻ | GANAB_S5F | 0 | 0 | 0 | 0 | | | | | | | |
| A6 | Neo⁺WT⁻ | GANAB_S5F | 0 | 0 | 0 | 0 | 19*01 | CALSEAEYN | | | 20-1*01 | CSARPGLAGG | 2565 2649 |
| | | | | | | | | FNKFYF | | | | YEQYF | |
| A9 | Neo⁺WT⁻ | GANAB_S5F | 0 | 0 | 0 | 0 | | | | | 6-5*01 | CASSYQTGN | 2650 |
| | | | | | | | | | | | | EQFF | |
| B24 | Neo⁺WT⁻ | GANAB_S5F | 0 | 0 | 0 | 0 | 35*01 | CAGQSRYNR | | | | | 2566 |
| | | | | | | | | DDKIIF | | | | | |
| B4 | Neo⁺WT⁻ | GANAB_S5F | 0 | 0 | 0 | 0 | 12-2*01 | CAAAAGANN | | | | | 2567 |
| | | | | | | | | LFF | | | | | |
| B5 | Neo⁺WT⁻ | GANAB_S5F | 0 | 0 | 0 | 0 | 25*01 | CAGGSNDYK | | | | | 2568 |
| | | | | | | | | LSF | | | | | |
| B8 | Neo⁺WT⁻ | GANAB_S5F | 0 | 0 | 0 | 0 | 1-1*01 | CAVSFYNQG | | | 19*01 | CASRGSGAST | 2569 2651 |
| | | | | | | | | GKLIF | | | | GELFF | |
| B9 | Neo⁺WT⁻ | GANAB_S5F | 0 | 0 | 0 | 0 | | | | | | | |
| C10 | Neo⁺WT⁻ | GANAB_S5F | 0 | 0 | 0 | 0 | | | | | | | |
| C11 | Neo⁺WT⁻ | GANAB_S5F | 0 | 0 | 0 | 0 | | | | | | | |
| C2 | Neo⁺WT⁻ | GANAB_S5F | 0 | 0 | 0 | 0 | | | | | | | |
| C22 | Neo⁺WT⁻ | GANAB_S5F | 0 | 0 | 0 | 0 | | | | | 9*01 | CASSGQGTD | 2652 |
| | | | | | | | | | | | | TQYF | |
| C3 | Neo⁺WT⁻ | GANAB_S5F | 0 | 0 | 0 | 0 | | | | | | | |
| C5 | Neo⁺WT⁻ | GANAB_S5F | 0 | 0 | 0 | 0 | | | | | 7-9*01 | CASSLWAEP | 2653 |
| | | | | | | | | | | | | DTQYF | |
| C6 | Neo⁺WT⁻ | GANAB_S5F | 0 | 0 | 0 | 0 | | | | | | | |
| D14 | Neo⁺WT⁻ | GANAB_S5F | 0 | 0 | 0 | 0 | | | | | | | |
| D19 | Neo⁺WT⁻ | GANAB_S5F | 0 | 0 | 0 | 0 | | | | | | | |
| D2 | Neo⁺WT⁻ | GANAB_S5F | 0 | 0 | 0 | 0 | | | | | | | |
| D4 | Neo⁺WT⁻ | GANAB_S5F | 0 | 0 | 0 | 0 | | | | | | | |
| E16 | Neo⁺WT⁻ | GANAB_S5F | 0 | 0 | 0 | 0 | | | | | | | |
| E8 | Neo⁺WT⁻ | GANAB_S5F | 0 | 0 | 0 | 0 | 8-1*01 | CAVNAPDTD | | | | | 2570 |
| | | | | | | | | KLIF | | | | | |
| E9 | Neo⁺WT⁻ | GANAB_S5F | 0 | 0 | 0 | 0 | 39*01 | CAVVNSNSG | | | | | 2571 |
| | | | | | | | | YALNF | | | | | |
| F13 | Neo⁺WT⁻ | GANAB_S5F | 0 | 0 | 0 | 0 | | | | | | | |
| F17 | Neo⁺WT⁻ | GANAB_S5F | 0 | 0 | 0 | 0 | | | | | | | |
| B22 | Neo⁺WT⁻ | GCN1L1_L6P | 0 | 0 | 0 | 0 | | | | | | | |
| A1 | Neo⁺WT⁻ | GNL3L_R4C | 0 | 0 | 0 | 0 | | | | | | | |
| A11 | Neo⁺WT⁻ | GNL3L_R4C | 0 | 0 | 0 | 0 | | | | | | | |
| A13 | Neo⁺WT⁻ | GNL3L_R4C | 0 | 0 | 0 | 0 | | | | | | | |
| A15 | Neo⁺WT⁻ | GNL3L_R4C | 0 | 0 | 0 | 0 | | | | | | | |
| A16 | Neo⁺WT⁻ | GNL3L_R4C | 0 | 0 | 0 | 0 | 21*01 | CAVLLNNAG | | | | | 2572 |
| | | | | | | | | NMLTF | | | | | |
| A17 | Neo⁺WT⁻ | GNL3L_R4C | 0 | 0 | 0 | 0 | | | | | 6-5*01 | CASSLGISY | 2654 |
| | | | | | | | | | | | | EQYF | |
| A2 | Neo⁺WT⁻ | GNL3L_R4C | 0 | 0 | 0 | 0 | | | | | 4-3*01 | CASSQVTGY | 2655 |
| | | | | | | | | | | | | EQYF | |
| A20 | Neo⁺WT⁻ | GNL3L_R4C | 0 | 0 | 0 | 0 | | | | | | | |
| A23 | Neo⁺WT⁻ | GNL3L_R4C | 0 | 0 | 0 | 0 | | | | | | | |
| A3 | Neo⁺WT⁻ | GNL3L_R4C | 0 | 0 | 0 | 0 | 20*01 | CAVSGGYRD | | | 4-1*01 | CASSQVSGGS | 2573 2656 |
| | | | | | | | | DKIIF | | | | YEQYF | |
| A4 | Neo⁺WT⁻ | GNL3L_R4C | 0 | 0 | 0 | 0 | 26-1*01 | CIVRDWANF | 13-1*01 | CAASIDRDDK | | | 2574 2613 |
| | | | | | | | | GNEKLTF | | IIF | | | |
| B13 | Neo⁺WT⁻ | GNL3L_R4C | 0 | 0 | 0 | 0 | | | | | | | |
| B16 | Neo⁺WT⁻ | GNL3L_R4C | 0 | 0 | 0 | 0 | | | | | | | |
| B17 | Neo⁺WT⁻ | GNL3L_R4C | 0 | 0 | 0 | 0 | 26-2*01 | CILTMGTSY | | | 4-3*01 | CASSQEPSGF | 2575 2657 |
| | | | | | | | | DKVIF | | | | YEQYF | |
| B18 | Neo⁺WT⁻ | GNL3L_R4C | 0 | 0 | 0 | 0 | 12-2*01 | CAVNEATGR | | | | | 2576 |
| | | | | | | | | RALTF | | | | | |
| B19 | Neo⁺WT⁻ | GNL3L_R4C | 0 | 0 | 0 | 0 | 22*01 | CAVDPNTGN | | | 4-2*01 | CASSQQGSEQ | 2577 2658 |
| | | | | | | | | QFYF | | | | YF | |
| B2 | Neo⁺WT⁻ | GNL3L_R4C | 0 | 0 | 0 | 0 | | | | | | | |
| B20 | Neo⁺WT⁻ | GNL3L_R4C | 0 | 0 | 0 | 0 | | | | | | | |
| B21 | Neo⁺WT⁻ | GNL3L_R4C | 0 | 0 | 0 | 0 | | | | | 7-6*01 | CASSLGEDY | 2659 |
| | | | | | | | | | | | | EQYF | |
| B23 | Neo⁺WT⁻ | GNL3L_R4C | 0 | 0 | 0 | 0 | | | | | | | |
| B6 | Neo⁺WT⁻ | GNL3L_R4C | 0 | 0 | 0 | 0 | | | | | | | |
| C12 | Neo⁺WT⁻ | GNL3L_R4C | 0 | 0 | 0 | 0 | | | | | | | |
| C13 | Neo⁺WT⁻ | GNL3L_R4C | 0 | 0 | 0 | 0 | | | | | | | |
| C14 | Neo⁺WT⁻ | GNL3L_R4C | 0 | 0 | 0 | 0 | | | | | 29-1*01 | CSVQGPYNE | 2660 |
| | | | | | | | | | | | | QFF | |
| C16 | Neo⁺WT⁻ | GNL3L_R4C | 0 | 0 | 0 | 0 | | | | | | | |
| C19 | Neo⁺WT⁻ | GNL3L_R4C | 0 | 0 | 0 | 0 | 39*01 | CAADTSGTY | | | | | 2578 |
| | | | | | | | | KYIF | | | | | |
| C21 | Neo⁺WT⁻ | GNL3L_R4C | 0 | 0 | 0 | 0 | | | | | | | |
| C24 | Neo⁺WT⁻ | GNL3L_R4C | 0 | 0 | 0 | 0 | 13-1*01 | CAATRDYKL | | | | | 2579 |
| | | | | | | | | SF | | | | | |
| C4 | Neo⁺WT⁻ | GNL3L_R4C | 0 | 0 | 0 | 0 | | | | | | | |
| C9 | Neo⁺WT⁻ | GNL3L_R4C | 0 | 0 | 0 | 0 | 19*01 | CALAGWEYG | | | 4-3*01 | CASSPGQGID | 2580 2661 |
| | | | | | | | | NKLVF | | | | SPLHF | |
| D12 | Neo⁺WT⁻ | GNL3L_R4C | 0 | 0 | 0 | 0 | | | | | | | |
| D15 | Neo⁺WT⁻ | GNL3L_R4C | 0 | 0 | 0 | 0 | | | | | | | |
| D16 | Neo⁺WT⁻ | GNL3L_R4C | 0 | 0 | 0 | 0 | | | | | | | |
| D18 | Neo⁺WT⁻ | GNL3L_R4C | 0 | 0 | 0 | 0 | | | | | | | |
| D21 | Neo⁺WT⁻ | GNL3L_R4C | 0 | 0 | 0 | 0 | | | | | | | |
| D23 | Neo⁺WT⁻ | GNL3L_R4C | 0 | 0 | 0 | 0 | 12-1*01 | CVVNINSGN | | | | | 2581 |
| | | | | | | | | TPLVF | | | | | |
| D24 | Neo⁺WT⁻ | GNL3L_R4C | 0 | 0 | 0 | 0 | | | | | | | |
| D3 | Neo⁺WT⁻ | GNL3L_R4C | 0 | 0 | 0 | 0 | | | | | | | |
| D5 | Neo⁺WT⁻ | GNL3L_R4C | 0 | 0 | 0 | 0 | 13-1*01 | CAAEGNTGG | | | | | 2582 |
| | | | | | | | | FKTIF | | | | | |
| D6 | Neo⁺WT⁻ | GNL3L_R4C | 0 | 0 | 0 | 0 | | | | | | | |
| D8 | Neo⁺WT⁻ | GNL3L_R4C | 0 | 0 | 0 | 0 | | | | | 6-5*01 | CASSYSGGY | 2662 |
| | | | | | | | | | | | | EQYF | |
| E10 | Neo⁺WT⁻ | GNL3L_R4C | 0 | 0 | 0 | 0 | | | | | | | |
| E15 | Neo⁺WT⁻ | GNL3L_R4C | 0 | 0 | 0 | 0 | | | | | | | |
| E17 | Neo⁺WT⁻ | GNL3L_R4C | 0 | 0 | 0 | 0 | | | | | | | |
| E18 | Neo⁺WT⁻ | GNL3L_R4C | 0 | 0 | 0 | 0 | | | | | | | |
| E21 | Neo⁺WT⁻ | GNL3L_R4C | 0 | 0 | 0 | 0 | | | | | | | |
| E22 | Neo⁺WT⁻ | GNL3L_R4C | 0 | 0 | 0 | 0 | | | | | 30*01 | CAWIRTGGY | 2663 |
| | | | | | | | | | | | | GYTF | |
| E23 | Neo⁺WT⁻ | GNL3L_R4C | 0 | 0 | 0 | 0 | | | | | | | |
| E7 | Neo⁺WT⁻ | GNL3L_R4C | 0 | 0 | 0 | 0 | | | | | | | |
| F1 | Neo⁺WT⁻ | GNL3L_R4C | 0 | 0 | 0 | 0 | | | | | | | |
| F10 | Neo⁺WT⁻ | GNL3L_R4C | 0 | 0 | 0 | 0 | | | | | | | |
| F12 | Neo⁺WT⁻ | GNL3L_R4C | 0 | 0 | 0 | 0 | | | | | | | |
| F14 | Neo⁺WT⁻ | GNL3L_R4C | 0 | 0 | 0 | 0 | | | | | | | |
| F16 | Neo⁺WT⁻ | GNL3L_R4C | 0 | 0 | 0 | 0 | | | | | | | |
| F18 | Neo⁺WT⁻ | GNL3L_R4C | 0 | 0 | 0 | 0 | | | | | | | |
| F2 | Neo⁺WT⁻ | GNL3L_R4C | 0 | 0 | 0 | 0 | | | | | | | |
| F20 | Neo⁺WT⁻ | GNL3L_R4C | 0 | 0 | 0 | 0 | | | | | | | |
| F21 | Neo⁺WT⁻ | GNL3L_R4C | 0 | 0 | 0 | 0 | 38-2/DV8*01F | CAAETSGSR | | | | | 2583 |
| | | | | | | | | LTF | | | | | |
| F22 | Neo⁺WT⁻ | GNL3L_R4C | 0 | 0 | 0 | 0 | 12-2*01 | CAVIDGAGS | | | | | 2584 |
| | | | | | | | | YQLTF | | | | | |
| F4 | Neo⁺WT⁻ | GNL3L_R4C | 0 | 0 | 0 | 0 | 12-2*01 | CAVFSGGYQ | | | 12-3*01, | CASSPGGGYE | 2585 2664 |
| | | | | | | | | KVTF | | | 12-4*01 | QYF | |
| F6 | Neo⁺WT⁻ | GNL3L_R4C | 0 | 0 | 0 | 0 | | | | | | | |
| A12 | Neo⁺WT⁻ | MAGEA6_KVAK | 0 | 0 | 0 | 0 | | | | | | | |
| A19 | Neo⁺WT⁻ | MAGEA6_KVAK | 0 | 0 | 0 | 0 | | | | | | | |
| A10 | Neo⁺WT⁻ | MLL2_L8H | 0 | 0 | 0 | 0 | 9-2*01 | CALRLSSGG | | | 2*01 | CASSFTVAGE | 2586 2665 |
| | | | | | | | | SNYKLTF | | | | QYF | |
| A24 | Neo⁺WT⁻ | MLL2_L8H | 0 | 0 | 0 | 0 | | | | | 6-6*01 | CASSYSGHN | 2666 |
| | | | | | | | | | | | | EQFF | |
| A7 | Neo⁺WT⁻ | MLL2_L8H | 0 | 0 | 0 | 0 | | | | | 4-1*01 | CASSYTIGN | 2667 |
| | | | | | | | | | | | | EQYF | |
| B1 | Neo⁺WT⁻ | MLL2_L8H | 0 | 0 | 0 | 0 | | | | | 10-3*01 | CAISDPDRG | 2668 |
| | | | | | | | | | | | | GRAFF | |
| C8 | Neo⁺WT⁻ | MLL2_L8H | 0 | 0 | 0 | 0 | | | | | | | |
| D11 | Neo⁺WT⁻ | MLL2_L8H | 0 | 0 | 0 | 0 | | | | | | | |
| D22 | Neo⁺WT⁻ | MLL2_L8H | 0 | 0 | 0 | 0 | 13-1*01 | CAAERGNNA | | | | | 2587 |
| | | | | | | | | RLMF | | | | | |
| E13 | Neo⁺WT⁻ | MLL2_L8H | 0 | 0 | 0 | 0 | | | | | | | |
| E19 | Neo⁺WT⁻ | MLL2_L8H | 0 | 0 | 0 | 0 | | | | | | | |
| F5 | Neo⁺WT⁻ | MLL2_L8H | 0 | 0 | 0 | 0 | | | | | | | |
| F3 | Neo⁺WT⁻ | NSDHL_A9V | 0 | 0 | 0 | 0 | 12-2*01 | CAVNPLEGG | | | | | 2588 |
| | | | | | | | | YNKLIF | | | | | |
| D20 | Neo⁺WT⁻ | PGM5_H5Y | 0 | 0 | 0 | 0 | | | | | | | |
| D9 | Neo⁺WT⁻ | PGM5_H5Y | 0 | 0 | 0 | 0 | | | | | | | |
| A14 | Neo⁺WT⁻ | SEC24A_P5L | 0 | 0 | 0 | 0 | | | | | 6-5*01 | CASTAGGGT | 2669 |
| | | | | | | | | | | | | DTQYF | |
| A22 | Neo⁺WT⁻ | SEC24A_P5L | 0 | 0 | 0 | 0 | | | | | 6-5*01 | CASSYSPGA | 2670 |
| | | | | | | | | | | | | YTEAFF | |
| A8 | Neo⁺WT⁻ | SEC24A_P5L | 0 | 0 | 0 | 0 | | | | | 29-1*01 | CSVWKENAF | 2671 |
| | | | | | | | | | | | | EQFF | |
| B11 | Neo⁺WT⁻ | SEC24A_P5L | 0 | 0 | 0 | 0 | | | | | | | |
| B15 | Neo⁺WT⁻ | SEC24A_P5L | 0 | 0 | 0 | 0 | | | | | | | |
| C1 | Neo⁺WT⁻ | SEC24A_P5L | 0 | 0 | 0 | 0 | | | | | | | |
| C15 | Neo⁺WT⁻ | SEC24A_P5L | 0 | 0 | 0 | 0 | | | | | | | |
| C17 | Neo⁺WT⁻ | SEC24A_P5L | 0 | 0 | 0 | 0 | | | | | | | |
| C23 | Neo⁺WT⁻ | SEC24A_P5L | 0 | 0 | 0 | 0 | 17*01 | CATDRNAPY | | | 4-3*01 | CASSQDTGYE | 2589 2672 |
| | | | | | | | | ALNF | | | | QYF | |
| C7 | Neo⁺WT⁻ | SEC24A_P5L | 0 | 0 | 0 | 0 | 17*01 | CATDEGNTP | | | 12-3*01, | CASGLDTQYF | 2590 2673 |
| | | | | | | | | LVF | | | 12-4*01 | | |
| D1 | Neo⁺WT⁻ | SEC24A_P5L | 0 | 0 | 0 | 0 | | | | | | | |
| D10 | Neo⁺WT⁻ | SEC24A_P5L | 0 | 0 | 0 | 0 | | | | | | | |
| E14 | Neo⁺WT⁻ | SEC24A_P5L | 0 | 0 | 0 | 0 | | | | | | | |
| E3 | Neo⁺WT⁻ | SEC24A_P5L | 0 | 0 | 0 | 0 | | | | | | | |
| F15 | Neo⁺WT⁻ | SEC24A_P5L | 0 | 0 | 0 | 0 | | | | | | | |
| F23 | Neo⁺WT⁻ | SEC24A_P5L | 0 | 0 | 0 | 0 | 39*01 | CAVDGGEYG | | | | | 2591 |
| | | | | | | | | NKLVF | | | | | |
| F24 | Neo⁺WT⁻ | SEC24A_P5L | 0 | 0 | 0 | 0 | | | | | 28*01 | CASSLTGVD | 2674 |
| | | | | | | | | | | | | GYTF | |
| F8 | Neo⁺WT⁻ | SEC24A_P5L | 0 | 0 | 0 | 0 | 17*01 | CATDDTGGF | | | | | 2592 |
| | | | | | | | | KTIF | | | | | |
| F9 | Neo⁺WT⁻ | SEC24A_P5L | 0 | 0 | 0 | 0 | 38-2/DV8*01 | CAYNPDMRF | | | 20-1*01 | CSAAYNTFGE | 2593 2675 |
| | | | | | | | | | | | | QFF | |
| C20 | Neo⁺WT⁻ | SMARCD3_H8Y | 0 | 0 | 0 | 0 | | | | | | | |
| E2 | Neo⁺WT⁻ | SMARCD3_H8Y | 0 | 0 | 0 | 0 | | | | | | | |
| E24 | Neo⁺WT⁻ | SMARCD3_H8Y | 0 | 0 | 0 | 0 | 8-2*01 | CVVSLHTGG | | | | | 2594 |
| | | | | | | | | FKTIF | | | | | |
| F7 | Neo⁺WT⁻ | SMARCD3_H8Y | 0 | 0 | 0 | 0 | | | | | | | |
| D17 | Neo⁺WT⁻ | SNX24_P6L | 0 | 0 | 0 | 0 | | | | | 20-1*01 | CSATSGTDT | 2676 |
| | | | | | | | | | | | | QYF | |
| D7 | Neo⁺WT⁻ | SNX24_P6L | 0 | 0 | 0 | 0 | 13-2*01 | CAENVTGNQ | | | 13*01 | CASSLGGFAG | 2595 2677 |
| | | | | | | | | FYF | | | | NTIYF | |
| E1 | Neo⁺WT⁻ | SNX24_P6L | 0 | 0 | 0 | 0 | 38-2/DV8*01 | CASKRGGAD | | | | | 2596 |
| | | | | | | | | GLTF | | | | | |
| C18 | Neo⁺WT⁻ | USP28_C5F | 0 | 0 | 0 | 0 | | | | | | | |
| E20 | Neo⁺WT⁻ | USP28_C5F | 0 | 0 | 0 | 0 | | | | | | | |
| B12 | Neo⁺WT⁻ | WDR46_T3I | 0 | 0 | 0 | 0 | | | | | | | |
| B3 | Neo⁺WT⁻ | WDR46_T3I | 0 | 0 | 0 | 0 | | | | | | | |
| B7 | Neo⁺WT⁻ | WDR46_T3I | 0 | 0 | 0 | 0 | | | | | | | |
| E11 | Neo⁺WT⁻ | WDR46_T3I | 0 | 0 | 0 | 0 | | | | | 29-1*01 | CSSPGREGP | 2678 |
| | | | | | | | | | | | | QYF | |
| E5 | Neo⁺WT⁻ | WDR46_T3I | 0 | 0 | 0 | 0 | | | | | | | |
| G5 | Neo⁻WT⁺ | AKAP13 | 0 | 0 | 0 | 0 | | | | | | | |
| H21 | Neo⁻WT⁺ | AKAP13 | 0 | 0 | 0 | 0 | 38-2/DV8*01 | CAYSPPLVF | | | 6-2*01, | CASRGGDGET | 2597 2679 |
| | | | | | | | | | | | 6-3*01 | QYF | |
| J11 | Neo⁻WT⁺ | AKAP13 | 0 | 0 | 0 | 0 | 38-2/DV8*01 | CAFAPGNNN | | | | | 2598 |
| | | | | | | | | DMRF | | | | | |
| K9 | Neo⁻WT⁺ | AKAP13 | 0 | 0 | 0 | 0 | 38-1*01 | CAYFPYGQN | | | 9*01 | CASGDSGALE | 2599 2680 |
| | | | | | | | | FVF | | | | FF | |
| L4 | Neo⁻WT⁺ | AKAP13 | 0 | 0 | 0 | 0 | | | | | | | |
| H19 | Neo⁻WT⁺ | COL18A1 | 0 | 0 | 0 | 0 | | | | | 19*01 | CASSSAGTE | 2681 |
| | | | | | | | | | | | | AFF | |
| L14 | Neo⁻WT⁺ | COL18A1 | 0 | 0 | 0 | 0 | 14/DV4*01 | CAMRVSDNF | | | | | 2600 |
| | | | | | | | | NKFYF | | | | | |
| G11 | Neo⁻WT⁺ | FNDC3B | 0 | 0 | 0 | 0 | | | | | | | |
| G1 | Neo⁻WT⁺ | GANAB | 0 | 0 | 0 | 0 | | | | | | | |
| G10 | Neo⁻WT⁺ | GANAB | 0 | 0 | 0 | 0 | | | | | | | |
| H15 | Neo⁻WT⁺ | GANAB | 0 | 0 | 0 | 0 | | | | | | | |
| H22 | Neo⁻WT⁺ | GANAB | 0 | 0 | 0 | 0 | | | | | | | |
| I21 | Neo⁻WT⁺ | GANAB | 0 | 0 | 0 | 0 | | | | | 4-3*01 | CASSQGGGG | 2682 |
| | | | | | | | | | | | | TDTQYF | |
| J14 | Neo⁻WT⁺ | GANAB | 0 | 0 | 0 | 0 | | | | | | | |
| J2 | Neo⁻WT⁺ | GANAB | 0 | 0 | 0 | 0 | 5*01 | CAESPSNFG | | | | | 2601 |
| | | | | | | | | NEKLTF | | | | | |
| L16 | Neo⁻WT⁺ | GANAB | 0 | 0 | 0 | 0 | | | | | | | |
| L3 | Neo⁻WT⁺ | GANAB | 0 | 0 | 0 | 0 | | | | | | | |
| M5 | Neo⁻WT⁺ | GANAB | 0 | 0 | 0 | 0 | | | | | | | |
| N4 | Neo⁻WT⁺ | GANAB | 0 | 0 | 0 | 0 | 13-2*01 | CAENPCSND | | | | | 2602 |
| | | | | | | | | YKLSF | | | | | |
| K14 | Neo⁻WT⁺ | MAGEA3_KVAE | 0 | 0 | 0 | 0 | | | | | 19*01 | CATWDSGNI | 2683 |
| | | | | | | | | | | | | QYF | |
| J15 | Neo⁻WT⁺ | MLL2 | 0 | 0 | 0 | 0 | 12-2*01 | CAVTSNTGK | | | | | 2603 |
| | | | | | | | | LIF | | | | | |
| J6 | Neo⁻WT⁺ | MLL2 | 0 | 0 | 0 | 0 | | | | | | | |
| K16 | Neo⁻WT⁺ | MLL2 | 0 | 0 | 0 | 0 | | | | | 20-1*01 | CSATCNGTF | 2684 |
| | | | | | | | | | | | | LYQETQYF | |
| M9 | Neo⁻WT⁺ | MLL2 | 0 | 0 | 0 | 0 | 14/DV4*01 | CAMREDYSS | | | 4-3*01 | CASSQGPPGS | 2604 2685 |
| | | | | | | | | ASKIIF | | | | GGGNEQFF | |
| I4 | Neo⁻WT⁺ | MRM1 | 0 | 0 | 0 | 0 | 12-3*01 | CAMALGNTG | | | | | 2605 |
| | | | | | | | | NQFYF | | | | | |
| J7 | Neo⁻WT⁺ | MRM1 | 0 | 0 | 0 | 0 | | | | | | | |
| K7 | Neo⁻WT⁺ | MRM1 | 0 | 0 | 0 | 0 | 12-2*01 | CAASGGGAD | | | | | 2606 |
| | | | | | | | | GLTF | | | | | |
| L7 | Neo⁻WT⁺ | MRM1 | GANAB | 0 | 0 | 0 | | | | | | | |
| L9 | Neo⁻WT⁺ | MRM1 | 0 | 0 | 0 | 0 | | | | | | | |
| N5 | Neo⁻WT⁺ | MRM1 | 0 | 0 | 0 | 0 | 12-2*01 | CAGYSGGGA | | | 6-5*01 | CASSSLGDSY | 2607 2686 |
| | | | | | | | | DGLTF | | | | EQYF | |
| N9 | Neo⁻WT⁺ | MRM1 | 0 | 0 | 0 | 0 | 12-2*01 | CAVNGNQFY | | | 12-3*01, | CASSLGGPGA | 2608 2687 |
| | | | | | | | | F | | | 12-4*01 | FF | |
| G8 | Neo⁻WT⁺ | PGM5 | 0 | 0 | 0 | 0 | 35*01 | CEGNNNDMR | 19*01 | CALTTDSNSG | | | 2609 2614 |
| | | | | | | | | F | | YALNF | | | |
| N6 | Neo⁻WT⁺ | PGM5 | 0 | 0 | 0 | 0 | | | | | | | |
| G13 | Neo⁻WT⁺ | SEC24A | 0 | 0 | 0 | 0 | | | | | | | |
| I10 | Neo⁻WT⁺ | SEC24A | 0 | 0 | 0 | 0 | | | | | | | |
| K6 | Neo⁻WT⁺ | SEC24A | 0 | 0 | 0 | 0 | | | | | | | |
| M6 | Neo⁻WT⁺ | SEC24A | 0 | 0 | 0 | 0 | 22*01 | CAVAHARLM | | | 6-2*01, | CASSSDINYG | 2610 2688 |
| | | | | | | | | F | | | 6-3*01 | YTF | |
| M8 | Neo⁻WT⁺ | SEC24A | 0 | 0 | 0 | 0 | | | | | 6-5*01 | CASSYSSGY | 2689 |
| | | | | | | | | | | | | GYTF | |
| O3 | Neo⁻WT⁺ | SMARCD3 | 0 | 0 | 0 | 0 | 8-3*01 | CAVGVEYGN | | | | | 2611 |
| | | | | | | | | KLVF | | | | | |
| K18 | Neo⁻WT⁺ | SNX24 | 0 | 0 | 0 | 0 | | | | | | | |
| H18 | Neo⁻WT⁺ | TEAD1_(VLE) | 0 | 0 | 0 | 0 | 24*01 | CAFSQYGNK | | | | | 2612 |
| | | | | | | | | LVF | | | | | |
| J3 | Neo⁻WT⁺ | USP28 | 0 | 0 | 0 | 0 | | | | | | | |
| H13 | Neo⁻WT⁺ | WDR46 | 0 | 0 | 0 | 0 | | | | | | | |
| J22 | Neo⁻WT⁺ | WDR46 | 0 | 0 | 0 | 0 | | | | | | | |

TABLE 8
Description of neoantigen and wildtype peptides used for experiment 5 and 6.

| | | | | | Position | | | Wildtype | | | Mutant |
|---|---|---|---|---|---|---|---|---|---|---|---|
| | | | Wild- | | of | | | HLA-A2 | | | HLA-A2 |
| | | | type | Mutant | mutation | | SEQ | Binding | | SEQ | Binding |
| Wildtype | | HUGO | amino | amino | in | Wildtype | ID | NetMHC | Mutant | ID | NetMHC |
| Name | Mutant Name | symbol | acid | acid | peptide | peptide | NO: | 4.0 (nM) | peptide | NO: | 4.0 (nM) |
| CHST13-VLV | CHST13-VLV_V1M | CHST13 | V | M | 1 | VLVDDAHGL | 2690 | 43.6 | MLVDDAHGL | 2848 | 13 |
| A2ML1-YLD | A2ML1-YLD_K7R | A2ML1 | K | R | 7 | YLDELIKNT | 2691 | 86.4 | YLDELIRNT | 2849 | 71.9 |
| (WT) | | | | | | | | | | | |
| AGFG2-FLQ | AGFG2-FLQ_S4S | AGFG2 | S | F | 4 | FLQSRGNEV | 2692 | 29.6 | FLQFRGNEV | 2850 | 47.7 |
| AGXT2L2-ILT | AGXT2L2-ILT_M5I | AGXT2L2 | M | I | 5 | ILTDMEEKV | 2693 | 75 | ILTDIEEKV | 2851 | 49.5 |
| AHNAK-SMP | AHNAK-SMP_S1F | AHNAK | S | F | 1 | SMPDFDLHL | 2694 | 22.9 | FMPDFDLHL | 2852 | 5.5 |
| AKAP13-KLM | AKAP13-KLM_Q8K | AKAP13 | Q | K | 8 | KLMNIQQQL | 2695 | 15.4 | KLMNIQQKL | 2853 | 20.3 |
| APBB2-GML | APBB2-GML_L3F | APBB2 | L | F | 3 | GMLPVDKPV | 2696 | 31 | GMFPVDKPV | 2854 | 20 |
| APBB2-VQY | APBB2-VQY_L7F | APBB2 | L | F | 7 | VQYLGMLPV | 2697 | 48.3 | VQYLGMFPV | 2855 | 12 |
| APCDD1L-RLP | APCDD1L-RLP_R1W | APCDD1L | R | W | 1 | RLPHVEYEL | 2698 | 51.1 | WLPHVEYEL | 2856 | 24 |
| ATP6AP1-KLG | ATP6AP1-KLG_G3W | ATP6AP1 | G | W | 3 | KLGASPLHV | 2699 | 50.2 | KLWASPLHV | 2857 | 5.5 |
| BAIAP3-ILN | BAIAP3-ILN_V6I | BAIAP3 | V | I | 6 | ILNVDVFTL | 2700 | 38.2 | ILNVDIFTL | 2858 | 26.8 |
| BCL9L-FVY | BCL9L-FVY_T6I | BCL9L | T | I | 6 | FVYVFTTHL | 2701 | 41.8 | FVYVFITHL | 2859 | 45.1 |
| BTBD1-FML | BTBD1-FML_LI | BTBD1 | L | I | 10 | FMLLTQARL | 2702 | 27.6 | FMLLTQARI | 2860 | 33.7 |
| C15orf32- | C15orf32-MLS_G9R | C15orf32 | G | R | 9 | MLSILALVGV | 2703 | 42.6 | MLSILALVRV | 2861 | 90.8 |
| MLS | | | | | | | | | | | |
| C17orf75- | C17orf75-ALS_V7A | C17orf75 | V | A | 7 | ALSYTPVEV | 2704 | 22.7 | ALSYTPAEV | 2862 | 31.8 |
| ALS | | | | | | | | | | | |
| C1S-10 | C1S-10_N1H | C1S | N | H | 1 | NLMDGDLGLI | 2705 | 55.9 | HLMDGDLGLI | 2863 | 50.4 |
| C1S-9 | C1S-9_N1H | C1S | N | H | 1 | NLMDGDLGL | 2706 | 12.9 | HLMDGDLGL | 2864 | 11.8 |
| C3orf58-LMV | C3orf58-LMV_L4P | C3orf58 | L | P | 4 | LMVLHSPSL | 2707 | 50 | LMVPHSPSL | 2865 | 31.9 |
| CAMK1D-KLF | CAMK1D-KLF_K8N | CAMK1D | K | N | 8 | KLFEQILKA | 2708 | 8.6 | KLFEQILNA | 2866 | 6.8 |
| CCM2-YML | CCM2-YML_R6H | CCM2 | R | H | 6 | YMLTLRTKL | 2709 | 36.3 | YMLTLHTKL | 2867 | 14.1 |
| CD47-GLT | CD47-GLT_V6F | CD47 | V | F | 6 | GLTSFVIAI | 2710 | 29.2 | GLTSFFIAI | 2868 | 38.3 |
| CDC37L1-FLS | CDC37L1-FLS_P6L | CDC37L1 | P | L | 6 | FLSDHPYLV | 2711 | 2.5 | FLSDHLYLV | 2869 | 2 |
| CELSR1-YLF | CELSR1-YLF_F3L | CELSR1 | F | L | 3 | YLFAIFSGL | 2712 | 4.5 | YLLAIFSGL | 2870 | 4.9 |
| CHD8-KLN | CHD8-KLN_P7A | CHD8 | P | A | 7 | KLNTITPVV | 2713 | 9 | KLNTITAVV | 2871 | 18.4 |
| CHST14-MLM | CHST14-MLM_F4L | CHST14 | F | L | 4 | MLMFAVIVA | 2714 | 18.5 | MLMLAVIVA | 2872 | 35.9 |
| CLCN4-LLA | CLCN4-LLA_G8V | CLCN4 | G | V | 8 | LLAGTLAGV | 2715 | 9.6 | LLAGTLAVV | 2873 | 17.7 |
| CNKSR1-SLA | CNKSR1-SLA_A9V | CNKSR1 | A | V | 9 | SLAPLSPRA | 2716 | 64.7 | SLAPLSPRV | 2874 | 9.9 |
| COL18A1-VLL | COL18A1-VLL_S8F | COL18A1 | S | F | 8 | VLLGVKLSGV | 2717 | 32.5 | VLLGVKLFGV | 2875 | 9.1 |
| DCHS1-TLF | DCHS1-TLF_I5M | DCHS1 | I | M | 5 | TLFTIVGTV | 2718 | 40.6 | TLFTMVGTV | 2876 | 39.6 |
| DHX33-LLA | DHX33-LLA_M4I | DHX33 | M | I | 4 | LLAMKVPNV | 2719 | 8.3 | LLAIKVPNV | 2877 | 13.7 |
| DHX33-LLA | DHX33-LLA_K5T | DHX33 | K | T | 5 | LLAMKVPNV | 2720 | 8.3 | LLAMTVPNV | 2878 | 8.5 |
| DNAH8-FMT | DNAH8-FMT_G7D | DNAH8 | G | D | 7 | FMTKINGLEV | 2721 | 24.6 | FMTKINDLEV | 2879 | 23.4 |
| DOCK7-FLN | DOCK7-FLN_M9L | DOCK7 | M | L | 9 | FLNDLLSVM | 2722 | 15.1 | FLNDLLSVL | 2880 | 6.3 |
| DOLPP1-GLM | DOLPP1-GLM_A4V | DOLPP1 | A | V | 4 | GLMAIAWFI | 2723 | 3.1 | GLMVIAWFI | 2881 | 7 |
| DRAM1-FII | DRAM1-FII_I3F | DRAM1 | I | F | 3 | FIISYVVAV | 2724 | 3.4 | FIFSYVVAV | 2882 | 3.1 |
| ERBB2-ALI | ERBB2-ALI_H8Y | ERBB2 | H | Y | 8 | ALIHHNTHL | 2725 | 79.3 | ALIHHNTYL | 2883 | 17.9 |
| EXOC3L4-ILL | EXOC3L4-ILL_V91 | EXOC3L4 | V | I | 9 | ILLDWAANV | 2726 | 3.5 | ILLDWAANI | 2884 | 6.3 |
| FAM47B-ALF | FAM47B-ALF_A1S | FAM47B | A | S | 1 | ALFSELSPV | 2727 | 3.9 | SLFSELSPV | 2885 | 3.8 |
| FBXL4-SLL | FBXL4-SLL_L2V | FBXL4 | L | V | 2 | SLLEYYTEL | 2728 | 4.1 | SVLEYYTEL | 2886 | 30.9 |
| FLNA-HIA | FLNA-HIA_P6L | FLNA | P | L | 6 | HIAKSPFEV | 2729 | 93.8 | HIAKSLFEV | 2887 | 21.7 |
| FNDC3B-VVL | FNDC3B-VVL_L3M | FNDC3B | L | M | 3 | VVLSWAPPV | 2730 | 9.6 | VVMSWAPPV | 2888 | 5.8 |
| GABRG3-TAM | GABRG3-TAM_L5I | GABRG3 | L | I | 5 | TAMDLFVTV | 2731 | 33.2 | TAMDIFVTV | 2889 | 27.2 |
| GABRG3-YVT | GABRG3-YVT_L7I | GABRG3 | L | I | 7 | YVTAMDLFV | 2732 | 17.2 | YVTAMDIFV | 2890 | 14.3 |
| GALC-YVV | GALC-YVV_V3L | GALC | V | L | 3 | YVVTWIVGA | 2733 | 47.2 | YVLTWIVGA | 2891 | 14 |
| GANAB-ALY | GANAB-ALY_S5F | GANAB | S | F | 5 | ALYGSVPVL | 2734 | 15.3 | ALYGFVPVL | 2892 | 8.3 |
| GCN1L1-10 | GCN1L1-10_L6P | GCN1L1 | L | P | 6 | ALLETLSLLL | 2735 | 35.7 | ALLETPSLLL | 2893 | 53.5 |
| GCN1L1-9 | GCN1L1-9_L6P | GCN1L1 | L | P | 6 | ALLETLSLL | 2736 | 11 | ALLETPSLL | 2894 | 19.9 |
| GLRA1-LIF | GLRA1-LIF_F6L | GLRA1 | F | L | 6 | LIFNMFYWI | 2737 | 16.2 | LIFNMLYWI | 2895 | 10.9 |
| GOLGA3-SLD | GOLGA3-SLD_P4L | GOLGA3 | P | L | 4 | SLDPTTSPV | 2738 | 10.4 | SLDLTTSPV | 2896 | 19 |
| GPR137B-KMS | GPR137B-KMS_S3P | GPR137B | S | P | 3 | KMSLANIYL | 2739 | 19.1 | KMPLANIYL | 2897 | 38.1 |
| GPR174-FSF | GPR174-FSF_P4S | GPR174 | P | S | 4 | FSFPLDFLV | 2740 | 14.8 | FSFSLDFLV | 2898 | 15 |
| GSTA4-FLQ | GSTA4-FLQ_E4K | GSTA4 | E | K | 4 | FLQEYTVKL | 2741 | 4.2 | FLQKYTVKL | 2899 | 11.7 |
| HAUS3-ILN | HAUS3-ILN_T7A | HAUS3 | T | A | 7 | ILNAMITKI | 2742 | 53 | ILNAMIAKI | 2900 | 48.1 |
| HBZ-KLS | HBZ-KLS_A7T | HBZ | A | T | 7 | KLSELHAYI | 2743 | 11.4 | KLSELHTYI | 2901 | 11.7 |
| HERC1-SLL | HERC1-SLL_PS | HERC1 | P | S | 6 | SLLLLPVSV | 2744 | 16.2 | SLLLLSVSV | 2902 | 17.3 |
| HLA-DRB5- | HLA-DRB5-YMA_KE | HLA-DRB5 | K | E | 4 | YMAKLTVTL | 2745 | 5.6 | YMAELTVTL | 2903 | 3 |
| YMA | | | | | | | | | | | |
| HOXC9-YMY | HOXC9-YMY_G4D | HOXC9 | G | D | 4 | YMYGSPGEL | 2746 | 24.4 | YMYDSPGEL | 2904 | 12.6 |
| HTR1F-10 | HTR1F-10_V1M | HTR1F | V | M | 1 | VMPFSIVYIV | 2747 | 27.5 | MMPFSIVYIV | 2905 | 10.5 |
| HTR1F-9 | HTR1F-9_V1M | HTR1F | V | M | 1 | VMPFSIVYI | 2748 | 31.4 | MMPFSIVYI | 2906 | 10.3 |
| HTR1F-LVM | HTR1F-LVM_V2M | HTR1F | V | M | 2 | LVMPFSIVYI | 2749 | 35.3 | LMMPFSIVYI | 2907 | 5.1 |
| IGF1-TMS | IGF1-TMS_S4F | IGF1 | S | F | 4 | TMSSSHLFYL | 2750 | 14.5 | TMSFSHLFYL | 2908 | 6.1 |
| IL17RA-FIT | IL17RA-FIT_TM | IL17RA | T | M | 3 | FITGISILL | 2751 | 34.8 | FIMGISILL | 2909 | 5.1 |
| INTS1-VLL | INTS1-VLL_L3F | INTS1 | L | F | 3 | VLLHRAFLV | 2752 | 11.3 | VLFHRAFLV | 2910 | 8.6 |
| IPO9-FSS | IPO9-FSS_E4D | IP09 | E | D | 4 | FSSEVLNLV | 2753 | 63.4 | FSSDVLNLV | 2911 | 43.5 |
| ITIH6-RLG | ITIH6-RLG_G3V | ITIH6 | G | V | 3 | RLGPYLEFL | 2754 | 23.4 | RLVPYLEFL | 2912 | 12.6 |
| KAT6A-KLS | KAT6A-KLS_MK | KAT6A | M | K | 7 | KLSREIMPV | 2755 | 5.8 | KLSREIKPV | 2913 | 64.8 |
| KCNB2-LLA | KCNB2-LLA_P6T | KCNB2 | P | T | 6 | LLAILPYYV | 2756 | 5.3 | LLAILTYYV | 2914 | 4.6 |
| KCNC3-FLP | KCNC3-FLP_A7V | KCNC3 | A | V | 7 | FLPDLNANA | 2757 | 21.3 | FLPDLNVNA | 2915 | 14.6 |
| KIF20B-YTS | KIF20B-YTS_S6L | KIF2OB | S | L | 6 | YTSEISSPI | 2758 | 35.4 | YTSEILSPI | 2916 | 14.3 |
| LCP1-NLF | LCP1-NLF_PL | LCP1 | P | L | 7 | NLFNRYPAL | 2759 | 37.3 | NLFNRYLAL | 2917 | 61.6 |
| MAR11-10 | MAR11-10_F1L | MAR11 | F | L | 1 | FLIASVTWLL | 2760 | 4.8 | LLIASVTWLL | 2918 | 15.3 |
| MAR11-9 | MAR11-9_F1L | MAR11 | F | L | 1 | FLIASVTWL | 2761 | 4.3 | LLIASVTWL | 2919 | 15.1 |
| ME1-FLD | ME1-FLD_A8G | ME1 | A | G | 8 | FLDEFMEAV | 2762 | 2.7 | FLDEFMEGV | 2920 | 2.7 |
| MLL2-ALS | MLL2-ALS_L8H | MLL2 | L | H | 8 | ALSPVIPLI | 2763 | 8.1 | ALSPVIPHI | 2921 | 11.3 |
| MPV17-YLW | MPV17-YLW_A5P | MPV17 | A | P | 5 | YLWPAVQLA | 2764 | 5.7 | YLWPPVQLA | 2922 | 9.3 |
| MRGPRF-RLW | MRGPRF-RLW_R1W | MRGPRF | R | W | 1 | RLWEPLRVV | 2765 | 35 | WLWEPLRVV | 2923 | 21.5 |
| MRM1-10 | MRM1-10_T6P | MRM1 | T | P | 6 | LLFGMTPCLL | 2766 | 22.6 | LLFGMPPCLL | 2924 | 34.7 |
| MRM1-9 | MRM1-9_T6P | MRM1 | T | P | 6 | LLFGMTPCL | 2767 | 7.4 | LLFGMPPCL | 2925 | 11.7 |
| MYH4-GLD | MYH4-GLD_D3N | MYH4 | D | N | 3 | GLDETIAKL | 2768 | 30.4 | GLNETIAKL | 2926 | 59.7 |
| MYPN-RVI | MYPN-RVI_R1L | MYPN | R | L | 1 | RVIGMPPPV | 2769 | 36 | LVIGMPPPV | 2927 | 20.7 |
| NBPF24-LLD | NBPF24-LLD_E6G | NBPF24 | E | G | 6 | LLDEKEPEV | 2770 | 13.1 | LLDEKGPEV | 2928 | 12.2 |
| NOS1-FID | NOS1-FID_D3Y | NOS1 | D | Y | 3 | FIDQYYSSI | 2771 | 40.9 | FIYQYYSSI | 2929 | 22.7 |
| NSDHL-ILT | NSDHL-ILT_A9V | NSDHL | A | V | 9 | ILTGLNYEA | 2772 | 41.7 | ILTGLNYEV | 2930 | 7.4 |
| OASL-ILD | OASL-ILD_DN | OASL | D | N | 3 | ILDPADPTL | 2773 | 37 | ILNPADPTL | 2931 | 73.5 |
| OR10A3-ILI | OR10A3-ILI_V6F | OR10A3 | V | F | 6 | ILIVMVPFL | 2774 | 10.4 | ILIVMFPFL | 2932 | 12.3 |
| OR14C36-FML | OR14C36-FML_V6L | OR14C36 | V | L | 6 | FMLYLVTLM | 2775 | 9.5 | FMLYLLTLM | 2933 | 7.6 |
| OR1G1-FLF | OR1G1-FLF_T8M | OR1G1 | T | M | 8 | FLFMYLVTV | 2776 | 3.3 | FLFMYLVMV | 2934 | 3.6 |
| OR2T1-FLN | OR2T1-FLN_F5L | OR2T1 | F | L | 5 | FLNVFFPLL | 2777 | 8.4 | FLNVLFPLL | 2935 | 11.5 |
| OR5K2-YIF | OR5K2-YIF_GE | OR5K2 | G | E | 5 | YIFLGNLAL | 2778 | 23.5 | YIFLENLAL | 2936 | 40.8 |
| OR5M3-KMV | OR5M3-KMV_T8N | OR5M3 | T | N | 8 | KMVAVFYTT | 2779 | 46.2 | KMVAVFYNT | 2937 | 55 |
| OR6F1-VLN | OR6F1-VLN_T8M | OR6F1 | T | M | 8 | VLNPFIYTL | 2780 | 8.8 | VLNPFIYML | 2938 | 10.8 |
| OR8B8-YVN | OR8B8-YVN_V2L | OR8B8 | V | L | 2 | YVNELVVFV | 2781 | 5.9 | YLNELVVFV | 2939 | 2.6 |
| OR8D4-10 | OR8D4-10_G3E | OR8D4 | G | E | 3 | FLGIYTVTVV | 2782 | 26.5 | FLEIYTVTVV | 2940 | 35.9 |
| OR8D4-9 | OR8D4-9_G3E | OR8D4 | G | E | 3 | FLGIYTVTV | 2783 | 8.2 | FLEIYTVTV | 2941 | 17 |
| OR9Q2-FLF | OR9Q2-FLF_S8F | OR9Q2 | S | F | 8 | FLFTFFASI | 2784 | 4.2 | FLFTFFAFI | 2942 | 3.8 |
| OR9Q2-SID | OR9Q2-SID_S1F | OR9Q2 | S | F | 1 | SIDCYLLAI | 2785 | 45.3 | FIDCYLLAI | 2943 | 7.3 |
| OVOL1-SLL | OVOL1-SLL_L9V | OVOL1 | L | V | 9 | SLLQGSPHL | 2786 | 18.2 | SLLQGSPHV | 2944 | 9.5 |
| PABPC1-MLG | PABPC1-MLG_R5Q | PABPC1 | R | Q | 5 | MLGERLFPL | 2787 | 4 | MLGEQLFPL | 2945 | 3.4 |
| PCDHB3-FLF | PCDHB3-FLF_SL | PCDHB3 | S | L | 4 | FLFSVLLFV | 2788 | 2.5 | FLFLVLLFV | 2946 | 5.9 |
| PELP1-LVL | PELP1-LVL_L3F | PELP1 | L | F | 3 | LVLPLVMGV | 2789 | 22.2 | LVFPLVMGV | 2947 | 16.5 |
| PELP1-RLH | PELP1-RLH_L7F | PELP1 | L | F | 7 | RLHDLVLPL | 2790 | 10.6 | RLHDLVFPL | 2948 | 4.7 |
| PGM5-AVG | PGM5-AVG_H5Y | PGM5 | H | Y | 5 | AVGSHVYSV | 2791 | 91.5 | AVGSYVYSV | 2949 | 29.3 |
| PHKA2-LLS | PHKA2-LLS_SF | PHKA2 | S | F | 6 | LLSIISFPA | 2792 | 33.3 | LLSIIFFPA | 2950 | 43.9 |
| PIGN-FLT | PIGN-FLT_P7H | PIGN | P | H | 7 | FLTVFSPFM | 2793 | 11.5 | FLTVFSHFM | 2951 | 25.7 |
| PLXNB1-VLF | PLXNB1-VLF_V1L | PLXNB1 | V | L | 1 | VLFAAFSSA | 2794 | 33.5 | LLFAAFSSA | 2952 | 26 |
| PRSS16-LLL | PRSS16-LLL_L1Q | PRSS16 | L | Q | 1 | LLLVSLWGL | 2795 | 9.4 | QLLVSLWGL | 2953 | 22.9 |
| PTCHD4-HQL | PTCHD4-HQL_G5V | PTCHD4 | G | V | 5 | HQLGGVVEV | 2796 | 49.2 | HQLGVVVEV | 2954 | 54 |
| PXDNL-SIL | PXDNL-SIL_S1F | PXDNL | S | F | 1 | SILDAVQRV | 2797 | 31.4 | FILDAVQRV | 2955 | 5.7 |
| REV3L-KLS | REV3L-KLS_R6H | REV3L | R | H | 6 | KLSEYRNSL | 2798 | 49.7 | KLSEYHNSL | 2956 | 19.7 |
| RRP1B-LLA | RRP1B-LLA_L7F | RRP1B | L | F | 7 | LLADQNLKFI | 2799 | 83.6 | LLADQNFKFI | 2957 | 30.1 |
| RYR3-VLN | RYR3-VLN_E6K | RYR3 | E | K | 6 | VLNYFEPYL | 2800 | 10.2 | VLNYFKPYL | 2958 | 20.4 |
| SCN3A-ALV | SCN3A-ALV_P7S | SCN3A | P | S | 7 | ALVGAIPSI | 2801 | 12.3 | ALVGAISSI | 2959 | 50.4 |
| SEC24A-FLY | SEC24A-FLY_P5L | SEC24A | P | L | 5 | FLYNPLTRV | 2802 | 4.4 | FLYNLLTRV | 2960 | 3.3 |
| SH3RF2-HMV | SH3RF2-HMV_MI | SH3RF2 | M | 1 | 2 | HMVEISTPV | 2803 | 6.4 | HIVEISTPV | 2961 | 34.1 |
| SHROOM2-KLL | SHROOM2-KLL_D6V | SHROOM2 | D | V | 6 | KLLAGDEIV | 2804 | 31.1 | KLLAGVEIV | 2962 | 11.1 |
| SLC15A2-ILG | SLC15A2-ILG_G4E | SLC15A2 | G | E | 4 | ILGGQVVHTV | 2805 | 86.8 | ILGEQVVHTV | 2963 | 49 |
| SLC16A7-AMA | SLC16A7-AMA_P6L | SLC16A7 | P | L | 6 | AMAGSPVFL | 2806 | 19.4 | AMAGSLVFL | 2964 | 8.1 |
| SLC1A2-YMS | SLC1A2-YMS_S3P | SLC1A2 | S | P | 3 | YMSTTIIAA | 2807 | 8.3 | YMPTTIIAA | 2965 | 13.8 |
| SLC2A3-ILV | SLC2A3-ILV_L9M | SLC2A3 | L | M | 9 | ILVAQIFGL | 2808 | 9 | ILVAQIFGM | 2966 | 28 |
| SLC2A4-ILI | SLC2A4-ILI_A4T | SLC2A4 | A | T | 4 | ILIAQVLGL | 2809 | 17.4 | ILITQVLGL | 2967 | 22.6 |
| SLC38A1-RIW | SLC38A1-RIW_W3L | SLC38A1 | W | L | 3 | RIWAALFLGL | 2810 | 70.9 | RILAALFLGL | 2968 | 96.9 |
| SLC39A4-LLG | SLC39A4-LLG_G4S | SLC39A4 | G | S | 4 | LLGGVVTVLL | 2811 | 27.9 | LLGSWTVLL | 2969 | 22.7 |
| SMARCD3-KLF | SMARCD3-KLF_H8Y | SMARCD3 | H | Y | 8 | KLFEFLVHGV | 2812 | 4.4 | KLFEFLVYGV | 2970 | 3.3 |
| SMOX-KLA | SMOX-KLA_KN | SMOX | K | N | 4 | KLAKPLPYT | 2813 | 88.9 | KLANPLPYT | 2971 | 59.8 |
| SNX24-KLS | SNX24-KLS_P6L | SNX24 | P | L | 6 | KLSHQPVLL | 2814 | 85.1 | KLSHQLVLL | 2972 | 25.8 |
| SPOP N147I- | SPOP N147I- | SPOP | N | I | 7 | FLLDEANGL | 2815 | 5.5 | FLLDEAIGL | 2973 | 3.3 |
| FLL | FLL_N7I | | | | | | | | | | |
| SREBF1-YLQ | SREBF1-YLQ_L6M | SREBF1 | L | M | 6 | YLQDSLATT | 2816 | 20 | YLQDSMATT | 2974 | 28.2 |
| SSPN-10 | SSPN-10_S9F | SSPN | S | F | 9 | FLMASISSSL | 2817 | 9.2 | FLMASISSFL | 2975 | 6.3 |
| SSPN-9 | SSPN-9_S9F | SSPN | S | F | 9 | FLMASISSS | 2818 | 21.8 | FLMASISSF | 2976 | 31.7 |
| SSPN-LMA | SSPN-LMA_S8F | SSPN | S | F | 8 | LMASISSSL | 2819 | 22.7 | LMASISSFL | 2977 | 10.5 |
| ST6GALNAC2- | ST6GALNAC2- | ST6GALNAC2 | Y | H | 6 | LLFALYFSA | 2820 | 7.4 | LLFALHFSA | 2978 | 9.6 |
| LLF | LLF_Y6H | | | | | | | | | | |
| STOX1-RLM | STOX1-RLM_M3I | STOX1 | M | I | 3 | RLMKHYPGI | 2821 | 18.5 | RLIKHYPGI | 2979 | 50.4 |
| TAS1R2-FMS | TAS1R2-FMS_A4S | TAS1R2 | A | S | 4 | FMSAYSGVL | 2822 | 25.4 | FMSSYSGVL | 2980 | 28 |
| TBX3-GMG | TBX3-GMG_T8M | TBX3 | T | M | 8 | GMGPLLATV | 2823 | 19.7 | GMGPLLAMV | 2981 | 20.2 |
| TEAD1-SVL | TEAD1-SVL_L9F | TEAD1 | L | F | 9 | SVLENFTILL | 2824 | 182.7 | SVLENFTIFL | 2982 | 84.7 |
| TEAD1-VLE | TEAD1-VLE_L8F | TEAD1 | L | F | 8 | VLENFTILLV | 2825 | 138.5 | VLENFTIFLV | 2983 | 50.6 |
| TEX2-FLM | TEX2-FLM_K8N | TEX2 | K | N | 8 | FLMTLETKM | 2826 | 13.2 | FLMTLETNM | 2984 | 9.3 |
| TMEM127-VTF | TMEM127-VTF_L9V | TMEM127 | L | V | 9 | VTFAVSFYLV | 2827 | 41.4 | VTFAVSFYVV | 2985 | 41.4 |
| TMEM195-ALS | TMEM195-ALS_S3L | TMEM195 | S | L | 3 | ALSQVTLLL | 2828 | 73.6 | ALLQVTLLL | 2986 | 40.6 |
| TP73-YTP | TP73-YTP_P3S | TP73 | P | S | 3 | YTPEHAASV | 2829 | 69 | YTSEHAASV | 2987 | 34.2 |
| TPP2-SLA | TPP2-SLA_WL | TPP2 | W | L | 7 | SLAETFWET | 2830 | 10.3 | SLAETFLET | 2988 | 52 |
| TRIM16-RMA | TRIM16-RMA_R1T | TRIM16 | R | T | 1 | RMAAISNTV | 2831 | 14.3 | TMAAISNTV | 2989 | 15.3 |
| TRIM58-VLA | TRIM58-VLA_V1F | TRIM58 | V | F | 1 | VLASPSVPL | 2832 | 38.5 | FLASPSVPL | 2990 | 5.9 |
| TRIM58-YMV | TRIM58-YMV_V3F | TRIM58 | V | F | 3 | YMVLASPSV | 2833 | 4.8 | YMFLASPSV | 2991 | 2.8 |
| TRPC1-MLL | TRPC1-MLL_Q5H | TRPC1 | Q | H | 5 | MLLKQDVSL | 2834 | 27.6 | MLLKHDVSL | 2992 | 15.4 |
| TRPV3-LLL | TRPV3-LLL_A8V | TRPV3 | A | V | 8 | LLLNMLIAL | 2835 | 8.5 | LLLNMLIVL | 2993 | 17.1 |
| TRPV4-FMI | TRPV4-FMI_A6T | TRPV4 | A | T | 6 | FMIGYASAL | 2836 | 5.2 | FMIGYTSAL | 2994 | 3.8 |
| TRPV4-YLL | TRPV4-YLL_A9T | TRPV4 | A | T | 9 | YLLFMIGYA | 2837 | 10.5 | YLLFMIGYT | 2995 | 31.3 |
| TTLL12-KLP | TTLL12-KLP_N7D | TTLL12 | N | D | 7 | KLPLDINPV | 2838 | 15.7 | KLPLDIDPV | 2996 | 21.4 |
| UNC13A-SQL | UNC13A-SQL_S1F | UNC13A | S | F | 1 | SQLNQSFEI | 2839 | 80 | FQLNQSFEI | 2997 | 8.9 |
| USP28-LII | USP28-LII_C5F | USP28 | C | F | 5 | LIIPCIHLI | 2840 | 32.7 | LIIPFIHLI | 2998 | 24.5 |
| VN1R2-LML | VN1R2-LML_L3F | VN1R2 | L | F | 3 | LMLWASSSI | 2841 | 37.3 | LMFWASSSI | 2999 | 23.1 |
| VN1R5-MII | VN1R5-MII_S7Y | VN1R5 | S | Y | 7 | MIISHLSLI | 2842 | 30.9 | MIISHLYLI | 3000 | 7.9 |
| WDR46-FLT | WDR46-FLT_T3I | WDR46 | T | I | 3 | FLTYLDVSV | 2843 | 6.4 | FLIYLDVSV | 3001 | 4 |
| ZDHHC17-LLL | ZDHHC17-LLL_T41 | ZDHHC17 | T | I | 4 | LLLTFNVSV | 2844 | 5.2 | LLLIFNVSV | 3002 | 14.5 |
| ZDHHC7-SLL | ZDHHC7-SLL_P7L | ZDHHC7 | P | L | 7 | SLLWMNPFV | 2845 | 3.7 | SLLWMNLFV | 3003 | 5.1 |
| ZFP90-FTQ | ZFP90-FTQ_EK | ZFP90 | E | K | 5 | FTQEEWYHV | 2846 | 23 | FTQEKWYHV | 3004 | 26.8 |
| ZNF827-NLF | ZNF827-NLF_54I | ZNF827 | S | I | 4 | NLFSQDISV | 2847 | 16 | NLFIQDISV | 3005 | 46.4 |

TABLE 9
TetTCR summary for experiment 5.

| | Sorted | | | | | | | | | | | | | | SEQ ID |
|---|---|---|---|---|---|---|---|---|---|---|---|---|---|---|---|
| Cell | Popu- | Detected Peptide by MID Count | | | | | TCRα, 1 | | TCRα, 2 | | TCRβ | | TCRβ | | NO (L |
| Name | lation | Rank 1 | Rank 2 | Rank 3 | Rank 4 | Rank 5 | TRAV | CDR3α | TRAV | CDR3α | TRBV | CDR3β | TRBV | CDR3β | to R) |
| SA1 | Clone | HCV- | HCV- | 0 | 0 | 0 | 38-2/ | CAYRSPPSS | | | 28*01 | CASSFLGTG | | | 3006 |
| | | KLV(PE) | KLV(APC) | | | | DV8*01 | EKLVF | | | | LNEQYF | | | 3490 |
| SB1 | Clone | HCV- | HCV- | 0 | 0 | 0 | 38-2/ | CAYRSPPSS | | | 28*01 | CASSFLGTG | | | 3006 |
| | | KLV(APC) | KLV(PE) | | | | DV8*01 | EKLVF | | | | LNEQYF | | | 3490 |
| SC1 | Clone | HCV- | HCV- | 0 | 0 | 0 | 38-2/ | CAYRSPPSS | | | 28*01 | CASSFLGTG | | | 3006 |
| | | KLV(APC) | KLV(PE) | | | | DV8*01 | EKLVF | | | | LNEQYF | | | 3490 |
| SD1 | Clone | 0 | 0 | 0 | 0 | 0 | | | | | | | | | |
| SE1 | Clone | HCV- | HCV- | 0 | 0 | 0 | 38-2/ | CAYRSPPSS | | | 28*01 | CASSFLGTG | | | 3006 |
| | | KLV(APC) | KLV(PE) | | | | DV8*01 | EKLVF | | | | LNEQYF | | | 3490 |
| SF1 | Clone | HCV- | HCV- | 0 | 0 | 0 | | | | | | | | | |
| | | KLV(APC) | KLV(PE) | | | | | | | | | | | | |
| SG1 | Clone | HCV- | HCV- | 0 | 0 | 0 | 38-2/ | CAYRSPPSS | | | 28*01 | CASSFLGTG | | | 3006 |
| | | KLV(APC) | KLV(PE) | | | | DV8*01 | EKLVF | | | | LNEQYF | | | 3490 |
| SH1 | Clone | HCV- | HCV- | 0 | 0 | 0 | 38-2/ | CAYRSPPSS | | | 28*01 | CASSFLGTG | | | 3006 |
| | | KLV(APC) | KLV(PE) | | | | DV8*01 | EKLVF | | | | LNEQYF | | | 3490 |
| GA10 | Neo⁺WT⁺ | FNDC3B- | FNDC3B- | 0 | 0 | 0 | 8- | CAVGAEDSN | | | 6-2*01, | CASSYSWGE | | | 3007 |
| | | VVL_L3M | VVL | | | | 3*01 | YQLIW | | | 6-3*01 | QFF | | | 3491 |
| GA12 | Neo⁺WT⁺ | OR6F1- | OR6F1- | 0 | 0 | 0 | | | | | 6-2*01, | CASTHWERV | | | 3492 |
| | | VLN | VLN_T8M | | | | | | | | 6-3*01 | DEQFF | | | |
| GA6 | Neo⁺WT⁺ | OR14C36- | OR14C36- | IL17RA- | 0 | 0 | 17*01 | CATDVNNDM | | | 6-5*01 | CASSYGVNT | | | 3008 |
| | | FML_V6L | FML | FIT_TM | | | | RF | | | | EAFF | | | 3493 |
| GB1 | Neo⁺WT⁺ | TTLL12- | TTLL12- | GP100- | 0 | 0 | 24*01 | CASFMDSNY | | | 10-3*01 | CAISRGDTE | | | 3009 |
| | | KLP_N7D | KLP | ALL | | | | QLIW | | | | AFF | | | 3494 |
| GB2 | Neo⁺WT⁺ | ME1- | ME1-FLD | 0 | 0 | 0 | 14/ | CAMRASLQG | | | 15*01 | CATSAKTRL | | | 3010 |
| | | FLD_A8G | | | | | DV4*01 | AQKLVF | | | | NTEAFF | | | 3495 |
| GB4 | Neo⁺WT⁺ | OR14C36- | 0 | 0 | 0 | 0 | 17*01 | CATDAQFLR | | | | | | | 3011 |
| | | FML_V6L | | | | | | SGAGSYQLT | | | | | | | |
| | | | | | | | | F | | | | | | | |
| GB8 | Neo⁺WT⁺ | 0 | 0 | 0 | 0 | 0 | 9-2*01 | CALWGTYKY | | | 13*01 | CASSKGQGA | | | 3012 |
| | | | | | | | | IF | | | | NYGYTF | | | 3496 |
| GC12 | Neo⁺WT⁺ | RYR3- | RYR3-VLN | TAS1R2- | OR10A3- | 0 | 8-3*01 | CAVGGEKLT | | | 5-1*01 | CASSLIDSPY | | | 3013 |
| | | VLN_E6K | | FMS | ILI | | | F | | | | EQYF | | | 3497 |
| GC5 | Neo⁺WT⁺ | FNDC3B- | FNDC3B- | 0 | 0 | 0 | 29/ | CAASATGGT | | | | | | | 3014 |
| | | VVL_L3M | VVL | | | | DV5*01 | SYGKLTF | | | | | | | |
| GD1 | Neo⁺WT⁺ | DHX33- | DHX33- | 0 | 0 | 0 | 12-2*01 | CASEVGGYA | | | | | | | 3015 |
| | | LLA | LLA_M4I | | | | | LNF | | | | | | | |
| GD2 | Neo⁺WT⁺ | 0 | 0 | 0 | 0 | 0 | | | | | | | | | |
| GD6 | Neo⁺WT⁺ | IGF1- | 0 | 0 | 0 | 0 | | | | | | | | | |
| | | TMS_S4F | | | | | | | | | | | | | |
| GD8 | Neo⁺WT⁺ | HAUS3- | HAUS3- | 0 | 0 | 0 | 24*01 | CAPHSGYST | | | 28*01 | CASSLGPNS | | | 3016 |
| | | ILN_T7A | ILN | | | | | LTF | | | | PLHF | | | 3498 |
| GE1 | Neo⁺WT⁺ | DHX33- | 0 | 0 | 0 | 0 | 12-2*01 | CAVIGTDKLI | | | 2*01 | CASGSYEQY | | | 3017 |
| | | LLA_M4I | | | | | | F | | | | F | | | 3499 |
| GE11 | Neo⁺WT⁺ | FNDC3B- | FNDC3B- | 0 | 0 | 0 | 29/ | CAASHGSSN | | | | | | | 3018 |
| | | VVL_L3M | VVL | | | | DV5*01 | TGKLIF | | | | | | | |
| GE2 | Neo⁺WT⁺ | 0 | 0 | 0 | 0 | 0 | | | | | | | | | |
| GE3 | Neo⁺WT⁺ | NSDHL- | 0 | 0 | 0 | 0 | 24*01 | CAFSGNTPL | | | | | | | 3019 |
| | | ILT_A9V | | | | | | VF | | | | | | | |
| GE9 | Neo⁺WT⁺ | HTR1F- | HTR1F-9 | GLRA1- | HTR1F- | 0 | 9-2*01 | CALSDRGGG | | | 6-5*01 | CASSSQTGP | | | 3020 |
| | | 9_V1M | | LIF_F6L | LVM_V2M | | | ADGLTF | | | | YSNQPQHF | | | 3500 |
| GF1 | Neo⁺WT⁺ | VN1R2- | MPV17- | VN1R2- | 0 | 0 | 12-2*01 | CAVGGDSSY | | | | | | | 3021 |
| | | LML_L3F | YLW_A5P | LML | | | | KLIF | | | | | | | |
| GF12 | Neo⁺WT⁺ | PHKA2- | PHKA2- | 0 | 0 | 0 | | | | | 6-5*01 | CASRDSVGG | | | 3501 |
| | | LLS_SF | LLS | | | | | | | | | GEGYTF | | | |
| GF2 | Neo⁺WT⁺ | SLC1A2- | 0 | 0 | 0 | 0 | 12-2*01 | CAAPPDSSY | | | | | | | 3022 |
| | | YMS_S3P | | | | | | KLIF | | | | | | | |
| GF3 | Neo⁺WT⁺ | GABRG3- | 0 | 0 | 0 | 0 | | | | | | | | | |
| | | TAM_L5I | | | | | | | | | | | | | |
| GF7 | Neo⁺WT⁺ | TRPV4- | TRPV4- | 0 | 0 | 0 | | | | | 27*01 | CASSVTGRW | | | 3502 |
| | | YLL_A9T | YLL | | | | | | | | | VPLHF | | | |
| GG5 | Neo⁺WT⁺ | 0 | 0 | 0 | 0 | 0 | | | | | | | | | |
| GH11 | Neo⁺WT⁺ | APBB2- | APBB2- | 0 | 0 | 0 | 12-2*01 | CAVTPTDSW | | | 13*01 | CASSQNGSE | | | 3025 |
| | | VQY | VQY_L7F | | | | | GKLQF | | | | AAYSNQPQH | | | 3503 |
| | | | | | | | | | | | | F | | | |
| GH2 | Neo⁺WT⁺ | CNKSR1- | CNKSR1- | 0 | 0 | 0 | | | | | | | | | |
| | | SLA_A9V | SLA | | | | | | | | | | | | |
| GH4 | Neo⁺WT⁺ | DOCK7- | DOCK7- | 0 | 0 | 0 | 21*01 | CAVRPLNTG | | | | | | | 3024 |
| | | FLN_M9L | FLN | | | | | TASKLTF | | | | | | | |
| GH5 | Neo⁺WT⁺ | OR6F1- | OR6F1- | 0 | 0 | 0 | 41*01 | CAVEGSRLT | | | | | | | 3025 |
| | | VLN_T8M | VLN | | | | | F | | | | | | | |
| GH6 | Neo⁺WT⁺ | DHX33- | DHX33- | KCNB2- | 0 | 0 | | | | | | | | | |
| | | LLA_M4I | LLA | LLA_P6T | | | | | | | | | | | |
| GH7 | Neo⁺WT⁺ | HTR1F- | HTR1F- | 0 | 0 | 0 | | | | | | | | | |
| | | 10_V1M | 10 | | | | | | | | | | | | |
| GH9 | Neo⁺WT⁺ | IL17RA- | 0 | 0 | 0 | 0 | | | | | | | | | |
| | | FIT_TM | | | | | | | | | | | | | |
| IA10 | Neo⁺WT⁺ | NSDHL- | NSDHL- | 0 | 0 | 0 | | | | | 20-1*01 | CSATGQNYE | | | 3504 |
| | | ILT_A9V | ILT | | | | | | | | | QYF | | | |
| IA4 | Neo⁺WT⁺ | DOCK7- | DOCK7- | 0 | 0 | 0 | 8-1*01 | CAVNAPTGF | | | 11-2*01 | CASSIGTVN | | | 3026 |
| | | FLN_M9L | FLN | | | | | QKLVF | | | | RGPNTEAFF | | | 3505 |
| IA5 | Neo⁺WT⁺ | 0 | 0 | 0 | 0 | 0 | 38-1*01 | CAFRQGGSE | | | 19*01 | CASSWQGS | | | 3027 |
| | | | | | | | | KLVF | | | | NIQYF | | | 3506 |
| IA9 | Neo⁺WT⁺ | OR5M3- | OR5M3- | 0 | 0 | 0 | 12-2*01 | CAVREYSGG | | | 5-6*01 | CASSPITNTG | | | 3028 |
| | | KMV | KMV_T8N | | | | | GADGLTF | | | | ELFF | | | 3507 |
| IB1 | Neo⁺WT⁺ | CLCN4- | CLCN4- | 0 | 0 | 0 | 19*01 | CALSEAYNN | | | 20-1*01 | CSATLDRNY | | | 3029 |
| | | LLA_G8V | LLA | | | | | NDMRF | | | | GYTF | | | 3508 |
| IB11 | Neo⁺WT⁺ | HTR1F- | HTR1F-9 | 0 | 0 | 0 | | | | | | | | | |
| | | 9_V1M | | | | | | | | | | | | | |
| IB4 | Neo⁺WT⁺ | CHD8- | CHD8- | 0 | 0 | 0 | 12-1*01 | CVVNVDNAG | | | 7-9*01 | CASSLETGG | | | 3030 |
| | | KLN_P7A | KLN | | | | | NMLTF | | | | WETQYF | | | 3509 |
| IB6 | Neo⁺WT⁺ | TRPC1- | TRPC1- | 0 | 0 | 0 | | | | | 12-3*01, | CASSLNMNT | | | 3510 |
| | | MLL_Q5H | MLL | | | | | | | | 12-4*01 | EAFF | | | |
| IC10 | Neo⁺WT⁺ | IGF1- | HBZ-KLS | 0 | 0 | 0 | | | | | 5-1*01 | CASSIDRTV | | | 3511 |
| | | TMS_S4F | | | | | | | | | | GNTIYF | | | |
| IC6 | Neo⁺WT⁺ | GALC- | GALC- | DRAM1- | 0 | 0 | | | | | | | | | |
| | | YVV_V3L | YVV | FII_I3F | | | | | | | | | | | |
| ID7 | Neo⁺WT⁺ | GABRG3- | GABRG3- | 0 | 0 | 0 | 29/ | CAARLYGGS | | | 20-1*01 | CSARDWGY | | | 3031 |
| | | TAM_L5I | TAM | | | | DV5*01 | QGNLIF | | | | EQYF | | | 3512 |
| ID9 | Neo⁺WT⁺ | HAUS3- | HAUS3- | 0 | 0 | 0 | | | | | | | | | |
| | | ILN_T7A | ILN | | | | | | | | | | | | |
| IE1 | Neo⁺WT⁺ | OR6F1- | OR6F1- | 0 | 0 | 0 | | | | | | | | | |
| | | VLN_T8M | VLN | | | | | | | | | | | | |
| IE2 | Neo⁺WT⁺ | 0 | 0 | 0 | 0 | 0 | | | | | | | | | |
| IE3 | Neo⁺WT⁺ | GABRG3- | GABRG3- | 0 | 0 | 0 | | | | | | | | | |
| | | TAM_L5I | TAM | | | | | | | | | | | | |
| IE7 | Neo⁺WT⁺ | 0 | 0 | 0 | 0 | 0 | 12-2*01 | CAVNEGGTS | | | 27*01 | CASSFGSGG | | | 3032 |
| | | | | | | | | YGKLTF | | | | ALYF | | | 3513 |
| IF3 | Neo⁺WT⁺ | TRPC1- | 0 | 0 | 0 | 0 | | | | | | | | | |
| | | MLL_Q5H | | | | | | | | | | | | | |
| IF4 | Neo⁺WT⁺ | HTR1F- | 0 | 0 | 0 | 0 | | | | | | | | | |
| | | 10_V1M | | | | | | | | | | | | | |
| IF6 | Neo⁺WT⁺ | TRIM16- | 0 | 0 | 0 | 0 | 8-1*01 | CAVFTGGGN | 12-2*01 | CAVRSGA | 7-2*01 | CASSFLLYN | | | 3033 |
| | | RMA_R1T | | | | | | KLTF | | GSYQLTF | | EQFF | | | 3450 |
| | | | | | | | | | | | | | | | 3514 |
| IF8 | Neo⁺WT⁺ | IL17RA- | IL17RA- | 0 | 0 | 0 | 12-3*01 | CAISMDTGR | | | 6-1*01 | CASSEMDGS | | | 3034 |
| | | FIT_TM | FIT | | | | | RALTF | | | | NQPQHF | | | 3515 |
| IF9 | Neo⁺WT⁺ | BAIAP3- | BAIAP3- | 0 | 0 | 0 | 12-2*01 | CAVRLVGGT | | | 29-1*01 | CSVRLTDYN | | | 3035 |
| | | ILN_V6I | ILN | | | | | SYGKLTF | | | | EQFF | | | 3516 |
| IG2 | Neo⁺WT⁺ | HAUS3- | 0 | 0 | 0 | 0 | | | | | | | | | |
| | | ILN_T7A | | | | | | | | | | | | | |
| IG8 | Neo⁺WT⁺ | SHROOM2- | SHROOM2- | 0 | 0 | 0 | 17*01 | CATLGDNDM | | | | | | | 3036 |
| | | KLL D6V | KLL | | | | | RF | | | | | | | |
| IG9 | Neo⁺WT⁺ | OR5M3- | CELSR1- | 0 | 0 | 0 | 14/ | CAMREGWG | | | 9*01 | CASSGSGAS | | | 3037 |
| | | KMV_T8N | YLF_F3L | | | | DV4*01 | DMRF | | | | TDTQYF | | | 3517 |
| IH12 | Neo⁺WT⁺ | 0 | 0 | 0 | 0 | 0 | | | | | | | | | |
| IH3 | Neo⁺WT⁺ | 0 | 0 | 0 | 0 | 0 | 19*01 | CALSGFGMD | | | | | | | 3038 |
| | | | | | | | | SSYKLIF | | | | | | | |
| IH7 | Neo⁺WT⁺ | GALC- | GALC- | 0 | 0 | 0 | 27*01 | CAGIGAGSY | | | | | | | 3039 |
| | | YVV_V3L | YVV | | | | | QLTF | | | | | | | |
| IH8 | Neo⁺WT⁺ | SMOX- | AKAP13- | 0 | 0 | 0 | 24*01 | CAFLMDSSY | | | 27*01 | CASSLGPGG | | | 3040 |
| | | KLA_KN | KLM | | | | | KLIF | | | | ASYTF | | | 3518 |
| JA12 | Neo⁺WT⁺ | HTR1F- | HTR1F-9 | 0 | 0 | 0 | | | | | 25-1*01 | CASSETSLFT | | | 3519 |
| | | 9_V1M | | | | | | | | | | HGYTF | | | |
| JA2 | Neo⁺WT⁺ | SLC15A2- | HAUS3- | 0 | 0 | 0 | 24*01 | CAFIGYGGS | 29/ | CASHGSS | 30*01 | CAWSSSVNT | | | 3041 |
| | | ILG | ILN_T7A | | | | | QGNLIF | DV5*01 | NTGKLIF | | EAFF | | | 3451 |
| | | | | | | | | | | | | | | | 3520 |
| JA4 | Neo⁺WT⁺ | FNDC3B- | FNDC3B- | 0 | 0 | 0 | 20*01 | CAVLTSGYS | | | 13*01 | CASSPMTGA | | | 3042 |
| | | VVL_L3M | VVL | | | | | TLTF | | | | EQFF | | | 3521 |
| JA6 | Neo⁺WT⁺ | HTR1F- | SEC24A- | SEC24A- | CNKSR1- | 0 | 24*01 | CAFIIQGAQ | | | 7-6*01 | CASSLGGLV | | | 3043 |
| | | 10_V1M | FLY | FLY_P5L | SLA_A9V | | | KLVF | | | | YNEQFF | | | 3522 |
| JA7 | Neo⁺WT⁺ | NSDHL- | 0 | 0 | 0 | 0 | | | | | | | | | |
| | | ILT_A9V | | | | | | | | | | | | | |
| JB1 | Neo⁺WT⁺ | 0 | 0 | 0 | 0 | 0 | 21*01 | CAVNSGYST | | | 27*01 | CASSFSGGN | | | 3044 |
| | | | | | | | | LTF | | | | EQFF | | | 3523 |
| JC12 | Neo⁺WT⁺ | 0 | 0 | 0 | 0 | 0 | | | | | 19*01 | CASTSGAYN | | | 3524 |
| | | | | | | | | | | | | EQFF | | | |
| JD11 | Neo⁺WT⁺ | HTR1F- | HTR1F-9 | DOLPP1- | 0 | 0 | 23/ | CAATEGGHN | | | 6-5*01 | CASSYQTGP | | | 3045 |
| | | 9_V1M | | GLM | | | DV6*01 | YGQNFVF | | | | YSNQPQHF | | | 3525 |
| JD3 | Neo⁺WT⁺ | HCV- | HCV- | 0 | 0 | 0 | | | | | | | | | |
| | | KLV(APC) | KLV(PE) | | | | | | | | | | | | |
| JD4 | Neo⁺WT⁺ | KCNB2- | 0 | 0 | 0 | 0 | 26-1*01 | CIVSPGGYQ | | | 27*01 | CASSWVGGA | | | 3046 |
| | | LLA_P6T | | | | | | KVTF | | | | DTQYF | | | 3526 |
| JE12 | Neo⁺WT⁺ | SLC16A7- | HTR1F- | 0 | 0 | 0 | 1-2*01 | CAVNGGDKI | | | 4-1*01 | CASSQDLGT | | | 3047 |
| | | AMA_P6L | 9_V1M | | | | | IF | | | | GNTIYF | | | 3527 |
| JE2 | Neo⁺WT⁺ | GALC- | 0 | 0 | 0 | 0 | | | | | | | | | |
| | | YVV_V3L | | | | | | | | | | | | | |
| JE3 | Neo⁺WT⁺ | 0 | 0 | 0 | 0 | 0 | 14/ | CAMRERGSY | | | | | | | 3048 |
| | | | | | | | DV4*01 | AGGTSYGKL | | | | | | | |
| | | | | | | | | TF | | | | | | | |
| JE4 | Neo⁺WT⁺ | CNKSR1- | 0 | 0 | 0 | 0 | 12-2*01 | CAVNKANDY | | | 20-1*01 | CSASDSLTI | | | 3049 |
| | | SLA_A9V | | | | | | KLSF | | | | SGFF | | | 3528 |
| JE7 | Neo⁺WT⁺ | 0 | 0 | 0 | 0 | 0 | 12-2*01 | CAVTADGQK | | | 5-5*01 | CASSLLGQT | | | 3050 |
| | | | | | | | | LLF | | | | NYGYTF | | | 3529 |
| JE8 | Neo⁺WT⁺ | NSDHL- | NSDHL- | 0 | 0 | 0 | 3*01 | CAVRDDNNN | | | 2*01 | CASSEGQGR | | | 3051 |
| | | ILT_A9V | ILT | | | | | DMRF | | | | WYEQYF | | | 3530 |
| JE9 | Neo⁺WT⁺ | NSDHL- | 0 | 0 | 0 | 0 | 19*01 | CALSEANTG | | | 9*01 | CASSVGSTE | | | 3052 |
| | | ILT_A9V | | | | | | GFKTIF | | | | AFF | | | 3531 |
| JF11 | Neo⁺WT⁺ | OR5M3- | OR5M3- | 0 | 0 | 0 | 14/ | CAMREGDRN | | | 4-2*01 | CASSPWEMN | | | 3053 |
| | | KMV | KMV_T8N | | | | DV4*01 | QFYF | | | | TEAFF | | | 3533 |
| JF12 | Neo⁺WT⁺ | VN1R5- | 0 | 0 | 0 | 0 | 14/ | CAMREAPEN | | | 20-1*01 | CSASVSGGP | | | 3055 |
| | | MII_S7Y | | | | | DV4*01 | GGTSYGKLT | | | | LDTQYF | | | 3533 |
| | | | | | | | | F | | | | | | | |
| JF6 | Neo⁺WT⁺ | BAIAP3- | BAIAP3- | 0 | 0 | 0 | 20*01 | CAVRSNDYK | | | 28*01 | CASSLGPME | | | 3055 |
| | | ILN | ILN_V6I | | | | | LSF | | | | ENIQYF | | | 3534 |
| JG8 | Neo⁺WT⁺ | HTR1F-10 | C17orf75- | C17orf75- | 0 | 0 | 10*01 | CVVRGGYNK | | | 5-4*01 | CASSSDRGE | | | 3056 |
| | | | ALS_V7A | ALS | | | | LIF | | | | QFF | | | 3535 |
| JH1 | Neo⁺WT⁺ | OR6F1- | C15orf32- | ZDHHC7- | 0 | 0 | | | | | | | | | |
| | | VLN_T8M | MLS_G9R | SLL | | | | | | | | | | | |
| JH6 | Neo⁺WT⁺ | 0 | 0 | 0 | 0 | 0 | | | | | | | | | |
| JH9 | Neo⁺WT⁺ | 0 | 0 | 0 | 0 | 0 | 5*01 | CAETGAGN | 12-2*01 | CAGDSWG | | | | | 3057 |
| | | | | | | | | MLTF | | KLQF | | | | | 3452 |
| KA1 | Neo⁺WT⁺ | HAUS3- | VN1R2- | 0 | 0 | 0 | | | | | | | | | |
| | | ILN_T7A | LML_L3F | | | | | | | | | | | | |
| KA10 | Neo⁺WT⁺ | ST6GALNAC2- | ST6GALNAC2- | KCNB2- | PHKA2- | 0 | 12-3*01 | CAFYDYKLS | | | 6-1*01 | CASSEVEGP | | | 3058 |
| | | LLF_Y6H | LLF | LLA_P6T | LLS_SF | | | F | | | | GELFF | | | 3536 |
| KA11 | Neo⁺WT⁺ | C3orf58- | C3orf58- | 0 | 0 | 0 | | | | | 27*01 | CASSLSGFG | | | 3537 |
| | | LMV | LMV_L4P | | | | | | | | | NTIYF | | | |
| KA2 | Neo⁺WT⁺ | TRIM58- | TRIM58- | 0 | 0 | 0 | 19*01 | CALSDPYSS | | | 14*01 | CASSQGGQD | | | 3059 |
| | | VLA | VLA_V1F | | | | | ASKIIF | | | | GHGTTNEKL | | | 3538 |
| | | | | | | | | | | | | FF | | | |
| KA6 | Neo⁺WT⁺ | IGF1- | IGF1-TMS | 0 | 0 | 0 | 14/ | CAMREGQD | | | 11-2*01 | CASSLGGGG | | | 3060 |
| | | TMS_S4F | | | | | DV4*01 | ARLMF | | | | PQETQYF | | | 3539 |
| KB12 | Neo⁺WT⁺ | PXDNL- | PXDNL- | 0 | 0 | 0 | 38-2/ | CARPEAGN | | | 10-2*01 | CATSRTDIS | | | 3061 |
| | | SIL_S1F | SIL | | | | DV8*01 | MLTF | | | | YEQYF | | | 3540 |
| KB3 | Neo⁺WT⁺ | TBX3- | TBX3- | 0 | 0 | 0 | | | | | 6-5*01 | CASSYYGTT | | | 3541 |
| | | GMG_T8M | GMG | | | | | | | | | DEQYF | | | |
| | 3062 | | | | | | | | | | | | | | |
| KB4 | Neo⁺WT⁺ | CNKSR1- | NOS1-FID | CNKSR1- | 0 | 0 | 17*01 | CATDEANFG | 17*01 | CARPPDD | 4-2*01 | CASSLGPSL | | | 3453 |
| | | SLA_A9V | | SLA | | | | NEKLTF | | YKLSF | | YEQYF | | | 3542 |
| KB7 | Neo⁺WT⁺ | MRM1- | 0 | 0 | 0 | 0 | 12-2*01 | CAVREGFKTI | | | 11-2*01 | CASSWGSSP | | | 3063 |
| | | 9_T6P | | | | | | F | | | | AETQYF | | | 3543 |
| KC10 | Neo⁺WT⁺ | DRAM1- | OR1G1- | 0 | 0 | 0 | | | | | 18*01 | CASSDQGAL | | | 3544 |
| | | FII_I3F | FLF | | | | | | | | | SSYEQYF | | | |
| KC12 | Neo⁺WT⁺ | RYR3-VLN | RYR3- | 0 | 0 | 0 | 12-1*01 | CGRTDSWG | | | 6-1*01 | CASSRIANN | | | 3064 |
| | | | VLN_E6K | | | | | KLQF | | | | NNEQFF | | | 3545 |
| KD1 | Neo⁺WT⁺ | OR5M3- | OR5M3- | 0 | 0 | 0 | 38-2/ | CAYRKENND | | | | | | | 3065 |
| | | KMV | KMV_T8N | | | | DV8*01 | MRF | | | | | | | |
| KD10 | Neo⁺WT⁺ | HERC1- | HERC1- | 0 | 0 | 0 | | | | | 29-1*01 | CSVPVFGRG | | | 3546 |
| | | SLL_PS | SLL | | | | | | | | | TGELFF | | | |
| KD12 | Neo⁺WT⁺ | HTR1F- | NBPF24- | SLC1A2- | 0 | 0 | | | | | 5-1*01 | CASSLWGTY | | | 3547 |
| | | 9_V1M | LLD_E6G | YMS_S3P | | | | | | | | NEQFF | | | |
| KD3 | Neo⁺WT⁺ | TRPV3- | HTR1F-10 | 0 | 0 | 0 | | | | | | | | | |
| | | LLL_A8V | | | | | | | | | | | | | |
| KD5 | Neo⁺WT⁺ | HTR1F- | 0 | 0 | 0 | 0 | | | | | 4-1*01 | CASSQADHY | | | 3548 |
| | | 10_V1M | | | | | | | | | | EQYF | | | |
| KD8 | Neo⁺WT⁺ | 0 | 0 | 0 | 0 | 0 | 12-2*01 | CAVIAGGFK | | | 27*01 | CASSLFNEQ | | | 3066 |
| | | | | | | | | TIF | | | | FF | | | 3549 |
| KD9 | Neo⁺WT⁺ | BTBD1- | BTBD1- | 0 | 0 | 0 | 8-3*01 | CAVGRRNS | | | | | | | 3067 |
| | | FML_LI | FML | | | | | GGYQKVTF | | | | | | | |
| KE12 | Neo⁺WT⁺ | OR5M3- | GABRG3- | 0 | 0 | 0 | 17*01 | CATFPMKTS | | | | | | | 3068 |
| | | KMV | TAM_L5I | | | | | YDKVIF | | | | | | | |
| KE3 | Neo⁺WT⁺ | OVOL1- | OVOL1- | 0 | 0 | 0 | | | | | | | | | |
| | | SLL_L9V | SLL | | | | | | | | | | | | |
| KE7 | Neo⁺WT⁺ | NSDHL- | 0 | 0 | 0 | 0 | | | | | | | | | |
| | | ILT_A9V | | | | | | | | | | | | | |
| KE8 | Neo⁺WT⁺ | HBZ-KLS | HBZ- | 0 | 0 | 0 | 1-2*01 | CAVGLGGGY | | | 27*01 | CASSFGGAS | | | 3069 |
| | | | KLS_A7T | | | | | NKLIF | | | | EAFF | | | 3550 |
| KE9 | Neo⁺WT⁺ | 0 | 0 | 0 | 0 | 0 | 12-2*01 | CAVNEERTD | | | 9*01 | CASSVGNTE | | | 3070 |
| | | | | | | | | KLIF | | | | AFF | | | 3551 |
| KF1 | Neo⁺WT⁺ | HBZ-KLS | HBZ- | 0 | 0 | 0 | 1-2*01 | CAVASGGYN | | | | | | | 3071 |
| | | | KLS_A7T | | | | | KLIF | | | | | | | |
| KF12 | Neo⁺WT⁺ | HAUS3- | 0 | 0 | 0 | 0 | | | | | | | | | |
| | | ILN_T7A | | | | | | | | | | | | | |
| KF2 | Neo⁺WT⁺ | BAIAP3- | 0 | 0 | 0 | 0 | | | | | | | | | |
| | | ILN_V6I | | | | | | | | | | | | | |
| KF4 | Neo⁺WT⁺ | HTR1F- | 0 | 0 | 0 | 0 | | | | | 6-5*01 | CASSPILTYE | | | 3552 |
| | | 9_V1M | | | | | | | | | | QYF | | | |
| KG4 | Neo⁺WT⁺ | TBX3- | 0 | 0 | 0 | 0 | 38-2/ | CAYRSGEYG | | | 19*01 | CASSMAGSS | | | 3072 |
| | | GMG_T8M | | | | | DV8*01 | NKLVF | | | | YEQYF | | | 3553 |
| KG7 | Neo⁺WT⁺ | 0 | 0 | 0 | 0 | 0 | | | | | | | | | |
| KG9 | Neo⁺WT⁺ | TRIM16- | GLRA1- | 0 | 0 | 0 | 25*01 | CAGNDYKLS | | | 12-3*01, | CASSLAQSD | | | 3073 |
| | | RMA | LIF_F6L | | | | | F | | | 12-4*01 | SLAFF | | | 3554 |
| KH2 | Neo⁺WT⁺ | HTR1F- | 0 | 0 | 0 | 0 | | | | | 27*01 | CASSLQGSD | | | 3555 |
| | | LVM_V2M | | | | | | | | | | NEQFF | | | |
| KH9 | Neo⁺WT⁺ | BCL9L- | 0 | 0 | 0 | 0 | 19*01 | CALSDPNDY | | | | | | | 3074 |
| | | FVY_T6I | | | | | | KLSF | | | | | | | |
| LA1 | Neo⁺WT⁺ | 0 | 0 | 0 | 0 | 0 | | | | | 20-1*01 | CSARDLTVA | | | 3556 |
| | | | | | | | | | | | | ETQYF | | | |
| LA2 | Neo⁺WT⁺ | HAUS3- | VN1R5- | HAUS3- | MAR11- | 0 | 12-2*01 | CAVYSGGGA | | | 6-5*01 | CASSSGGA | | | 3075 |
| | | ILN_T7A | MII_S7Y | ILN | 9_F1L | | | DGLTF | | | | WYTF | | | 3557 |
| LA5 | Neo⁺WT⁺ | BAIAP3- | PELP1- | MAR11- | HAUS3- | USP28- | | | | | 2*01 | CASSPRGVG | | | 3558 |
| | | ILN_V6I | LVL_L3F | 9_F1L | ILN | LII_C5F | | | | | | TEAFF | | | |
| LA7 | Neo⁺WT⁺ | NSDHL- | NSDHL- | 0 | 0 | 0 | 14/ | CAMREGLSN | | | 4-1*01 | CASSPSSGG | | | 3076 |
| | | ILT_A9V | ILT | | | | DV4*01 | YGGSQGNLI | | | | ITDTQYF | | | 3559 |
| | | | | | | | | F | | | | | | | |
| LB10 | Neo⁺WT⁺ | VN1R2- | 0 | 0 | 0 | 0 | | | | | 6-1*01 | CASSEQGGE | | | 3560 |
| | | LML_L3F | | | | | | | | | | RRNTEAFF | | | |
| LB12 | Neo⁺WT⁺ | RYR3- | ITIH6- | ITIH6- | 0 | 0 | 29/ | CAASGGGA | 38-1*01 | CAFMKQS | | | | | 3077 |
| | | VLN_E6K | RLG_G3V | RLG | | | DV5*01 | QKLVF | | YRDDKIIF | | | | | 3454 |
| LB3 | Neo⁺WT⁺ | 0 | 0 | 0 | 0 | 0 | 40*01 | CLLGGSNYK | | | | | | | 3078 |
| | | | | | | | | LTF | | | | | | | |
| LB4 | Neo⁺WT⁺ | ITIH6- | 0 | 0 | 0 | 0 | 14/ | CAMRAGYNT | | | 4-1*01 | CASSQGWG | | | 3079 |
| | | RLG_G3V | | | | | DV4*01 | DKLIF | | | | VETQYF | | | 3561 |
| LC1 | Neo⁺WT⁺ | PHKA2- | PHKA2- | 0 | 0 | 0 | 12-2*01 | CAVGSQGNL | 12-1 | VLFRMLTF | 6-5*01 | CASSYSTGG | | | 3080 |
| | | LLS_SF | LLS | | | | | IF | | | | TDTQYF | | | 3455 |
| | | | | | | | | | | | | | | | 3562 |
| LC11 | Neo⁺WT⁺ | 0 | 0 | 0 | 0 | 0 | 21*01 | CAVSGYSTL | | | 19*01 | CASSRTQGY | | | 3081 |
| | | | | | | | | TF | | | | SNQPQHF | | | 3563 |
| LC3 | Neo⁺WT⁺ | BAIAP3- | BAIAP3- | 0 | 0 | 0 | 5*01 | CAEIPRSPM | | | 28*01 | CASSIFTRRG | | | 3082 |
| | | ILN_V6I | ILN | | | | | FSGGYNKLI | | | | YEQYF | | | 3564 |
| | | | | | | | | F | | | | | | | |
| LC5 | Neo⁺WT⁺ | TRIM58- | OR5K2- | TRIM58- | 0 | 0 | 5*01 | CAETLYNQG | | | 9*01 | CASSGRQGI | | | 3083 |
| | | YMV_V3F | YIF | YMV | | | | GKLIF | | | | DTEAFF | | | 3565 |
| LD10 | Neo⁺WT⁺ | 0 | 0 | 0 | 0 | 0 | 8-2*01 | CVVERGSTL | | | 30*01 | CAWIDFLGQ | | | 3084 |
| | | | | | | | | GRLYF | | | | MNTEAFF | | | 3566 |
| LD11 | Neo⁺WT⁺ | ST6GALNAC2- | ST6GALNAC2- | MAR11- | 0 | 0 | 12-3*01 | CAMGDARL | | | 15*01 | CATSGTGGT | | | 3085 |
| | | LLF_Y6H | LLF | 9_F1L | | | | MF | | | | GELFF | | | 3567 |
| LD4 | Neo⁺WT⁺ | PIGN- | 0 | 0 | 0 | 0 | 12-2*01 | CAVLNSGGY | | | 6-2*01, | CASSLSYEQ | | | 3086 |
| | | FLT_P7H | | | | | | QKVTF | | | 6-3*01 | YF | | | 3568 |
| LE1 | Neo⁺WT⁺ | DHX33- | DHX33- | 0 | 0 | 0 | | | | | | | | | |
| | | LLA_M4I | LLA | | | | | | | | | | | | |
| LE10 | Neo⁺WT⁺ | FNDC3B- | FNDC3B- | 0 | 0 | 0 | 8-6*01 | CAVTDNNAG | | | 7-3*01 | CASSFGPGY | | | 3087 |
| | | VVL_L3M | VVL | | | | | NMLTF | | | | EQYF | | | 3569 |
| LE3 | Neo⁺WT⁺ | OR5M3- | OR5M3- | 0 | 0 | 0 | | | | | | | | | |
| | | KMV_T8N | KMV | | | | | | | | | | | | |
| LE7 | Neo⁺WT⁺ | C15orf32- | PHKA2- | 0 | 0 | 0 | | | | | 6-6*01 | CASSYARDR | | | 3570 |
| | | MLS_G9R | LLS_SF | | | | | | | | | NTEAFF | | | |
| LE9 | Neo⁺WT⁺ | BTBD1- | BTBD1- | 0 | 0 | 0 | 6*01 | CALDILISG | | | 30*01 | CAGWDRTP | | | 3088 |
| | | FML_LI | FML | | | | | GSYIPTF | | | | YEQYF | | | 3571 |
| LF11 | Neo⁺WT⁺ | BTBD1- | BTBD1- | 0 | 0 | 0 | 19*01 | CALSSPTYN | | | 2*01 | CASSEDAGN | | | 3089 |
| | | FML_LI | FML | | | | | NNDMRF | | | | YGYTF | | | 3572 |
| LF12 | Neo⁺WT⁺ | 0 | 0 | 0 | 0 | 0 | 24*01 | CAFESGGGA | | | | | | | 3090 |
| | | | | | | | | DGLTF | | | | | | | |
| LG1 | Neo⁺WT⁺ | OR5M3- | 0 | 0 | 0 | 0 | | | | | 6-1*01 | CASSEIQAFE | | | 3573 |
| | | KMV_T8N | | | | | | | | | | ETQYF | | | |
| LG12 | Neo⁺WT⁺ | PXDNL- | PXDNL- | 0 | 0 | 0 | 12-2*01 | CAVRGGND | 3*01F | CAGFGNV | 28*01 | CASSLFARG | | | 3091 |
| | | SIL_S1F | SIL | | | | | MRF | | LHC | | GPTDTQYF | | | 3456 |
| | | | | | | | | | | | | | | | 3574 |
| LG2 | Neo⁺WT⁺ | TRPV4- | ST6GALNAC2- | TRPV4- | 0 | 0 | 12-2*01 | CAVNTRTAL | | | 19*01 | CASSFGSGN | | | 3092 |
| | | FMI | LLF_Y6H | FMI_A6T | | | | IF | | | | TIYF | | | 3575 |
| LG8 | Neo⁺WT⁺ | GALC- | GALC-YVV | 0 | 0 | 0 | 38-2/ | CACMDSNY | | | 7-9*01 | CASSPHSGG | | | 3093 |
| | | YVV_V3L | | | | | DV8*01 | QLIW | | | | DPRNEQFF | | | 3576 |
| LH10 | Neo⁺WT⁺ | 0 | 0 | 0 | 0 | 0 | 8-4*01 | CAVTLTGGG | | | | | | | 3094 |
| | | | | | | | | NKLTF | | | | | | | |
| LH2 | Neo⁺WT⁺ | APBB2- | RYR3- | ZDHHC17- | 0 | 0 | | | | | | | | | |
| | | VQY_L7F | VLN_E6K | LLL_T4I | | | | | | | | | | | |
| LH4 | Neo⁺WT⁺ | NSDHL- | NSDHL- | 0 | 0 | 0 | 14/ | CAMRELSGN | 41*01 | CAVEGSRL | 9*01 | CASSVGGGH | | | 3095 |
| | | ILT_A9V | ILT | | | | DV4*01 | YGGSQGNLI | | TF | | QPQHF | | | 3025 |
| | | | | | | | | F | | | | | | | 3577 |
| LH6 | Neo⁺WT⁺ | CLCN4- | CLCN4- | 0 | 0 | 0 | 12-3*01 | CAMSVPGYS | | | 2*01 | CANGQGDY | | | 3096 |
| | | LLA_G8V | LLA | | | | | TLTF | | | | EQYF | | | 3578 |
| LH8 | Neo⁺WT⁺ | NSDHL- | 0 | 0 | 0 | 0 | | | | | | | | | |
| | | ILT_A9V | | | | | | | | | | | | | |
| LH9 | Neo⁺WT⁺ | PLXNB1- | PLXNB1- | 0 | 0 | 0 | | | | | | | | | |
| | | VLF_V1L | VLF | | | | | | | | | | | | |
| MA2 | Neo⁺WT⁺ | CNKSR1- | CNKSR1- | 0 | 0 | 0 | 14/ | CAMREGNT | | | 19*01 | CASSETSGLI | | | 3097 |
| | | SLA_A9V | SLA | | | | DV4*01 | GGFKTIF | | | | DEKLFF | | | 3579 |
| MA3 | Neo⁺WT⁺ | KCNC3- | KCNC3- | EXOC3L4- | 0 | 0 | | | | | 7-9*01 | CASSLAYRP | | | 3580 |
| | | FLP_A7V | FLP | ILL_V9I | | | | | | | | YEQYF | | | |
| MA5 | Neo⁺WT⁺ | SLC1A2- | SLC1A2- | DRAM1- | 0 | 0 | | | | | 2*01 | CASSWTGDS | | | 3581 |
| | | YMS_S3P | YMS | FII_I3F | | | | | | | | NQPQHF | | | |
| MA7 | Neo⁺WT⁺ | OVOL1- | OVOL1- | 0 | 0 | 0 | 12-2*01 | CAVNAPGTY | | | 12-3*01, | CASSPPDQV | | | 3098 |
| | | SLL_L9V | SLL | | | | | KYIF | | | 12-4*01 | YNEQFF | | | 3582 |
| MA8 | Neo⁺WT⁺ | STOX1- | STOX1- | 0 | 0 | 0 | 41*01 | CAVSYDSNY | | | 7-9*01 | CASSSNIWS | | | 3099 |
| | | RLM_M3I | RLM | | | | | QLIW | | | | PDTQYF | | | 3583 |
| MB4 | Neo⁺WT⁺ | 0 | 0 | 0 | 0 | 0 | 8-3*01 | CAVGARNTG | | | 12-3*01, | CASSPWDSS | | | 3100 |
| | | | | | | | | FQKLVF | | | 12-4*01 | GELFF | | | 3584 |
| MD3 | Neo⁺WT⁺ | HCV- | HCV- | 0 | 0 | 0 | | | | | 3-1*01 | CASSYYSGQ | | | 3585 |
| | | KLV(APC) | KLV(PE) | | | | | | | | | GNEKLFF | | | |
| MD5 | Neo⁺WT⁺ | 0 | 0 | 0 | 0 | 0 | 12-2*01 | CAAATGGGN | 9-2*01 | CALTASNQ | 27*01 | CASSLGGHQ | | | 3101 |
| | | | | | | | | KLTF | | AGTALIF | | PQHF | | | 3457 |
| | | | | | | | | | | | | | | | 3586 |
| ME3 | Neo⁺WT⁺ | BAIAP3- | BAIAP3- | 0 | 0 | 0 | | | | | 13*01 | CASTESSYN | | | 3587 |
| | | ILN_V6I | ILN | | | | | | | | | EQFF | | | |
| ME8 | Neo⁺WT⁺ | ITIH6- | ITIH6- | 0 | 0 | 0 | 12-2*01 | CAVKGGSQ | | | 9*01 | CASSVQSTD | | | 3102 |
| | | RLG_G3V | RLG | | | | | GNLIF | | | | TQYF | | | 3588 |
| MF11 | Neo⁺WT⁺ | 0 | 0 | 0 | 0 | 0 | 41*01 | CAVRPTSPY | | | | | | | 3103 |
| | | | | | | | | GGSQGNLIF | | | | | | | |
| MF4 | Neo⁺WT⁺ | 0 | 0 | 0 | 0 | 0 | | | | | 13*01 | CASSSTVGV | | | 3589 |
| | | | | | | | | | | | | RDYHSGNTI | | | |
| | | | | | | | | | | | | YF | | | |
| MF7 | Neo⁺WT⁺ | 0 | 0 | 0 | 0 | 0 | 12-2*01 | CAVKGTDKLI | | | 2*01 | CASTDLSDT | | | 3104 |
| | | | | | | | | F | | | | QYF | | | 3590 |
| MG10 | Neo⁺WT⁺ | 0 | 0 | 0 | 0 | 0 | | | | | | | | | |
| MG12 | Neo⁺WT⁺ | GALC- | GALC- | 0 | 0 | 0 | 6*01 | CALGTHDMR | | | 10-1*01 | CASSESGAA | | | 3105 |
| | | YVV_V3L | YVV | | | | | F | | | | YTGELFF | | | 3591 |
| MG3 | Neo⁺WT⁺ | 0 | 0 | 0 | 0 | 0 | | | | | 3-1*01 | CATERGFRT | | | 3592 |
| | | | | | | | | | | | | DTQYF | | | |
| MG6 | Neo⁺WT⁺ | OVOL1- | OVOL1- | 0 | 0 | 0 | 41*01 | CAVEGSRLT | | | | | | | 3025 |
| | | SLL_L9V | SLL | | | | | F | | | | | | | |
| MH10 | Neo⁺WT⁺ | 0 | 0 | 0 | 0 | 0 | | | | | 6-5*01 | CASSYEQGP | | | 3593 |
| | | | | | | | | | | | | YEQYF | | | |
| MH12 | Neo⁺WT⁺ | 0 | 0 | 0 | 0 | 0 | | | | | 3-1*01 | CASSQAYGG | | | 3594 |
| | | | | | | | | | | | | DSSYEQYF | | | |
| MH9 | Neo⁺WT⁺ | PHKA2- | KCNB2- | 0 | 0 | 0 | | | | | | | | | |
| | | LLS_SF | LLA_P6T | | | | | | | | | | | | |
| NA11 | Neo⁺WT⁺ | 0 | 0 | 0 | 0 | 0 | 1-2*01 | CARMSTDS | | | 2*01 | CASGRSGGV | | | 3106 |
| | | | | | | | | WGKLQF | | | | GRNGYTF | | | 3595 |
| NA2 | Neo⁺WT⁺ | DHX33- | 0 | 0 | 0 | 0 | | | | | 9*01 | CASALGSGG | | | 3596 |
| | | LLA_K5T | | | | | | | | | | AYEQFF | | | |
| NA3 | Neo⁺WT⁺ | CELSR1- | NOS1- | MRGPRF- | 0 | 0 | 8-6*01 | CAAFMFSGG | | | 27*01 | CASTLGQGN | | | 3107 |
| | | YLF_F3L | FID_D3Y | RLW_R1W | | | | YNKLIF | | | | TEAFF | | | 3597 |
| NA6 | Neo⁺WT⁺ | 0 | 0 | 0 | 0 | 0 | | | | | 3-1*01 | CASSQDTGS | | | 3598 |
| | | | | | | | | | | | | GNTIYF | | | |
| NA9 | Neo⁺WT⁺ | PHKA2- | 0 | 0 | 0 | 0 | 12-1*01 | CVVSNQAGT | | | 4-2*01 | CASSQGPGT | | | 3108 |
| | | LLS_SF | | | | | | ALIF | | | | GFEGYTF | | | 3599 |
| NB11 | Neo⁺WT⁺ | 0 | 0 | 0 | 0 | 0 | 21*01 | CAVRFNTGF | | | 27*01 | CASRRGPTD | | | 3109 |
| | | | | | | | | QKLVF | | | | TQYF | | | 3600 |
| NB12 | Neo⁺WT⁺ | KIF20B- | OR8B8- | A2ML1- | A2ML1- | 0 | 25*01 | CAGRGMVG | | | 2*01 | CASSALAGG | | | 3110 |
| | | YTS_S6L | YVN | YLD_K7R | YLD_WT | | | NKLVF | | | | YNEQFF | | | 3601 |
| NB3 | Neo⁺WT⁺ | CNKSR1- | CNKSR1- | 0 | 0 | 0 | 4*01 | CLIRDDKII | | | 20-1*01 | CSAPKEEPY | | | 3111 |
| | | SLA_A9V | SLA | | | | | F | | | | GYTF | | | 3602 |
| NB4 | Neo⁺WT⁺ | HTR1F- | 0 | 0 | 0 | 0 | 10*01 | CVVMPPGS | 1-2*01 | CAVTVVDN | 27*01 | CASSLTGSA | | | 3112 |
| | | 9_V1M | | | | | | GYSTLTF | | NARLMF | | EAFF | | | 3458 |
| | | | | | | | | | | | | | | | 3603 |
| NB5 | Neo⁺WT⁺ | ATP6AP1- | HCV- | HCV- | 0 | 0 | | | | | | | | | |
| | | KLG_G3W | KLV(APC) | KLV(PE) | | | | | | | | | | | |
| NB6 | Neo⁺WT⁺ | HTR1F- | OR5M3- | 0 | 0 | 0 | 14/ | CAMRETDSS | 8-6*01 | CAVTPNFN | 29-1*01 | CSVERGGDE | | | 3113 |
| | | 10_V1M | KMV | | | | DV4*01 | YKLIF | | KFYF | | QFF | | | 3459 |
| | | | | | | | | | | | | | | | 3604 |
| NB8 | Neo⁺WT⁺ | 0 | 0 | 0 | 0 | 0 | 17*01 | CATGGPDM | | | 6-2*01, | CASSYSISG | | | 3114 |
| | | | | | | | | RF | | | 6-3*01 | QGGETQYF | | | 3605 |
| NC10 | Neo⁺WT⁺ | DHX33- | DHX33- | DHX33- | HCV- | 0 | | | | | 7-8*01 | CASSGRQGS | | | 3606 |
| | | LLA_K5T | LLA_M4I | LLA | KLV(APC) | | | | | | | YEQYF | | | |
| NC7 | Neo⁺WT⁺ | OR2T1- | OR2T1- | 0 | 0 | 0 | 19*01 | CALKNLGNY | | | 20-1*01 | CSAPSYREL | | | 3115 |
| | | FLN_F5L | FLN | | | | | GQNFVF | | | | AGAYLQETQ | | | 3607 |
| | | | | | | | | | | | | YF | | | |
| NC8 | Neo⁺WT⁺ | BAIAP3- | BAIAP3- | 0 | 0 | 0 | 20*01 | CAVQAGNTD | 4*01 | CLVGDLTS | 20-1*01 | CSARTWTGN | | | 3116 |
| | | ILN_V6I | ILN | | | | | KLIF | | FQGAQKL | | TIYF | | | 3460 |
| | | | | | | | | | | VF | | | | | 3608 |
| ND11 | Neo⁺WT⁺ | HTR1F- | HTR1F-9 | 0 | 0 | 0 | 29/ | CAASANNQG | | | 12-3*01, | CASSLVAGP | | | 3117 |
| | | 9_V1M | | | | | DV5*01 | GKLIF | | | 12-4*01 | YSQETQYF | | | 3609 |
| ND12 | Neo⁺WT⁺ | 0 | 0 | 0 | 0 | 0 | | | | | 13*01 | CASSPRTGV | | | 3610 |
| | | | | | | | | | | | | GEQYF | | | |
| ND3 | Neo⁺WT⁺ | ITIH6- | PIGN- | 0 | 0 | 0 | | | | | | | | | |
| | | RLG_G3V | FLT_P7H | | | | | | | | | | | | |
| ND7 | Neo⁺WT⁺ | PHKA2- | PHKA2- | 0 | 0 | 0 | 12-1*01 | CVVGPGANN | 9-2*01 | CALSMYS | 12-3*01, | CASSFRQTL | | | 3118 |
| | | LLS_SF | LLS | | | | | LFF | | GGGADGL | 12-4*01 | AVYEQYF | | | 3461 |
| | | | | | | | | | | TF | | | | | 3611 |
| NE1 | Neo⁺WT⁺ | GCN1L1-9 | APBB2- | GPR174- | 0 | 0 | | | | | | | | | |
| | | | VQY | FSF | | | | | | | | | | | |
| NE11 | Neo⁺WT⁺ | C17orf75- | 0 | 0 | 0 | 0 | 12-2*01 | CAVSTGGGA | | | 5-4*01 | CASSLGQEIP | | | 3119 |
| | | ALS_V7A | | | | | | DGLTF | | | | YYGYTF | | | 3612 |
| NE4 | Neo⁺WT⁺ | CHD8- | 0 | 0 | 0 | 0 | | | | | | | | | |
| | | KLN_P7A | | | | | | | | | | | | | |
| NE8 | Neo⁺WT⁺ | BAIAP3- | BAIAP3- | 0 | 0 | 0 | 26-1*01 | CIVRVAGQF | | | 11-2*01 | CASSSQGGA | | | 3120 |
| | | ILN_V6I | ILN | | | | | YF | | | | KNEQYF | | | 3613 |
| NF12 | Neo⁺WT⁺ | PRSS16- | OR10A3- | 0 | 0 | 0 | 5*01 | CAETPNDYK | 1-2*01 | CAVRDYY | 28*01 | CASSLVGAD | | | 3121 |
| | | LLL_L1Q | ILI | | | | | LSF | | QLIW | | RSGELFF | | | 3462 |
| | | | | | | | | | | | | | | | 3614 |
| NF4 | Neo⁺WT⁺ | 0 | 0 | 0 | 0 | 0 | | | | | | | | | |
| NG2 | Neo⁺WT⁺ | IL17RA- | 0 | 0 | 0 | 0 | | | | | | | | | |
| | | FIT_TM | | | | | | | | | | | | | |
| NG3 | Neo⁺WT⁺ | 0 | 0 | 0 | 0 | 0 | | | | | | | | | |
| NG5 | Neo⁺WT⁺ | DHX33- | HTR1F- | 0 | 0 | 0 | | | | | | | | | |
| | | LLA_K5T | LVM_V2M | | | | | | | | | | | | |
| NG9 | Neo⁺WT⁺ | HBZ- | GABRG3- | GABRG3- | OR8B8- | 0 | 38-1*01 | CAFDFSSGS | | | 19*01 | CASSYGQPN | | | 3122 |
| | | KLS_A7T | YVT | YVT_L7I | YVN_V2L | | | ARQLTF | | | | TEAFF | | | 3615 |
| NH11 | Neo⁺WT⁺ | GABRG3- | GABRG3- | 0 | 0 | 0 | 12-2*01 | CAVNRLVF | | | | | | | 3123 |
| | | YVT_L7I | YVT | | | | | | | | | | | | |
| NH2 | Neo⁺WT⁺ | 0 | 0 | 0 | 0 | 0 | 12-2*01 | CAVTKNTGN | | | 20-1*01 | CSARTGNTN | | | 3124 |
| | | | | | | | | QFYF | | | | EQFF | | | 3616 |
| NH3 | Neo⁺WT⁺ | CD47- | CD47- | 0 | 0 | 0 | | | | | | | | | |
| | | GLT_V6F | GLT | | | | | | | | | | | | |
| NH5 | Neo⁺WT⁺ | 0 | 0 | 0 | 0 | 0 | | | | | | | | | |
| OA1 | Neo⁺WT⁺ | CNKSR1- | CNKSR1- | 0 | 0 | 0 | 14/ | CAMSVSSND | | | 3-1*01 | CASSQGTGG | | | 3125 |
| | | SLA | SLA_A9V | | | | DV4*01 | YKLSF | | | | IVDIQYF | | | 3617 |
| OA5 | Neo⁺WT⁺ | 0 | 0 | 0 | 0 | 0 | 21*01 | CAVRLGGSY | | | 11-2*01 | CASRDILYNE | | | 3126 |
| | | | | | | | | IPTF | | | | QFF | | | 3618 |
| OB11 | Neo⁺WT⁺ | 0 | 0 | 0 | 0 | 0 | 12-3*01 | CAMSGDYKL | | | 28*01 | CASSSQSSG | | | 3127 |
| | | | | | | | | SF | | | | ANVLTF | | | 3619 |
| OB4 | Neo⁺WT⁺ | 0 | 0 | 0 | 0 | 0 | | | | | | | | | |
| OB7 | Neo⁺WT⁺ | TRPC1- | TRPC1- | VN1R5- | 0 | 0 | 3*01F | CGSADRGST | | | | | | | 3128 |
| | | MLL_Q5H | MLL | MII_S7Y | | | | LGRLYF | | | | | | | |
| OC10 | Neo⁺WT⁺ | 0 | 0 | 0 | 0 | 0 | | | | | 4-2*01 | CASSQMTG | | | 3620 |
| | | | | | | | | | | | | GGEQFF | | | |
| OC3 | Neo⁺WT⁺ | 0 | 0 | 0 | 0 | 0 | | | | | 11-2*01 | CASSPGGEA | | | 3621 |
| | | | | | | | | | | | | FF | | | |
| OC4 | Neo⁺WT⁺ | ITIH6- | ITIH6- | 0 | 0 | 0 | 19*01 | CALSEAEGY | | | | | | | 3129 |
| | | RLG_G3V | RLG | | | | | SGYALNF | | | | | | | |
| OD11 | Neo⁺WT⁺ | 0 | 0 | 0 | 0 | 0 | | | | | 7-9*01 | CASSLVRQE | | | 3622 |
| | | | | | | | | | | | | AAGELFF | | | |
| OD3 | Neo⁺WT⁺ | OR8B8- | 0 | 0 | 0 | 0 | | | | | | | | | |
| | | YVN_V2L | | | | | | | | | | | | | |
| OD4 | Neo⁺WT⁺ | GABRG3- | 0 | 0 | 0 | 0 | 27*01 | CAGVFGGSN | | | 9*01 | CASSGGQG | | | 3130 |
| | | TAM_L5I | | | | | | YKLTF | | | | WTDTQYF | | | 3623 |
| OD6 | Neo⁺WT⁺ | 0 | 0 | 0 | 0 | 0 | | | | | | | | | |
| OD7 | Neo⁺WT⁺ | VN1R5- | VN1R5- | 0 | 0 | 0 | 24*01 | CAFILVANAG | | | 12-3*01, | CASRPRQVE | | | 3131 |
| | | MII_S7Y | MII | | | | | KSTF | | | 12-4*01 | TQYF | | | 3624 |
| OD8 | Neo⁺WT⁺ | NSDHL- | NSDHL- | 0 | 0 | 0 | 14/ | CAMREVAGA | | | 10-2*01 | CASGTLNSN | | | 3132 |
| | | ILT | ILT_A9V | | | | DV4*01 | GNKLTF | | | | QPQHF | | | 3625 |
| OE1 | Neo⁺WT⁺ | TEAD1- | NSDHL- | NSDHL- | 0 | 0 | | | | | | | | | |
| | | VLE | ILT | ILT_A9V | | | | | | | | | | | |
| OE10 | Neo⁺WT⁺ | HCV- | HCV- | 0 | 0 | 0 | 38-2/ | CAYGEDDKII | | | 25-1*01 | CASRRDSSG | | | 3133 |
| | | KLV(APC) | KLV(PE) | | | | DV8*01 | F | | | | YTF | | | 3626 |
| OE2 | Neo⁺WT⁺ | 0 | 0 | 0 | 0 | 0 | | | | | | | | | |
| OE3 | Neo⁺WT⁺ | 0 | 0 | 0 | 0 | 0 | | | | | | | | | |
| OE8 | Neo⁺WT⁺ | DHX33- | 0 | 0 | 0 | 0 | 16*01 | CALRFNSSY | | | | | | | 3134 |
| | | LLA_K5T | | | | | | KLIF | | | | | | | |
| OF10 | Neo⁺WT⁺ | HTR1F- | 0 | 0 | 0 | 0 | | | | | 29-1*01 | CSVEQGGDT | | | 3627 |
| | | 10_V1M | | | | | | | | | | QYF | | | |
| OF6 | Neo⁺WT⁺ | 0 | 0 | 0 | 0 | 0 | | | | | | | | | |
| OF7 | Neo⁺WT⁺ | PIGN- | 0 | 0 | 0 | 0 | | | | | | | | | |
| | | FLT_P7H | | | | | | | | | | | | | |
| OF8 | Neo⁺WT⁺ | HTR1F- | 0 | 0 | 0 | 0 | 5*01 | CAESKESGG | | | 27*01 | CASSGFSNQ | | | 3135 |
| | | 9_V1M | | | | | | YQKVTF | | | | PQHF | | | 3628 |
| OF9 | Neo⁺WT⁺ | 0 | 0 | 0 | 0 | 0 | | | | | 2*01 | CATLWGTDT | | | 3629 |
| | | | | | | | | | | | | QYF | | | |
| OG5 | Neo⁺WT⁺ | 0 | 0 | 0 | 0 | 0 | | | | | 6-2*01, | CASSYIPGR | | | 3630 |
| | | | | | | | | | | | 6-3*01 | YEQYF | | | |
| OG7 | Neo⁺WT⁺ | AGXT2L2- | 0 | 0 | 0 | 0 | 14/ | CAMREPRG | | | | | | | 3136 |
| | | ILT_M5I | | | | | DV4*01 | GRRALTF | | | | | | | |
| OH10 | Neo⁺WT⁺ | 0 | 0 | 0 | 0 | 0 | 19*01 | CALRGFQDS | | | | | | | 3137 |
| | | | | | | | | NYQLIW | | | | | | | |
| OH11 | Neo⁺WT⁺ | PHKA2- | 0 | 0 | 0 | 0 | 12-2*01 | CAVTSDGQK | | | 5-4*01 | CASSLEGEK | | | 3138 |
| | | LLS_SF | | | | | | LLF | | | | LFF | | | 3631 |
| OH2 | Neo⁺WT⁺ | OR6F1- | 0 | 0 | 0 | 0 | | | | | | | | | |
| | | VLN_T8M | | | | | | | | | | | | | |
| OH4 | Neo⁺WT⁺ | 0 | 0 | 0 | 0 | 0 | | | | | | | | | |
| OH8 | Neo⁺WT⁺ | GALC- | 0 | 0 | 0 | 0 | | | | | | | | | |
| | | YVV_V3L | | | | | | | | | | | | | |
| OH9 | Neo⁺WT⁺ | BAIAP3- | BAIAP3- | 0 | 0 | 0 | | | | | | | | | |
| | | ILN_V6I | ILN | | | | | | | | | | | | |
| SA10 | Neo⁺WT⁺ | HTR1F- | HTR1F-9 | 0 | 0 | 0 | 26-2*01 | CILRDPYNTD | | | | | | | 3139 |
| | | 9_V1M | | | | | | KLIF | | | | | | | |
| SA11 | Neo⁺WT⁺ | 0 | 0 | 0 | 0 | 0 | | | | | | | | | |
| SA4 | Neo⁺WT⁺ | OR5M3- | OR5M3- | 0 | 0 | 0 | 38-2/ | CAYRTGDSG | | | 10-1*01 | CASSEFRDR | | | 3140 |
| | | KMV | KMV_T8N | | | | DV8*01 | AGSYQLTF | | | | NQPQHF | | | 3632 |
| SA6 | Neo⁺WT⁺ | 0 | 0 | 0 | 0 | 0 | | | | | 4-2*01 | CASSQGRR | | | 3633 |
| | | | | | | | | | | | | GGGDKNIQY | | | |
| | | | | | | | | | | | | F | | | |
| SC10 | Neo⁺WT⁺ | 0 | 0 | 0 | 0 | 0 | | | | | | | | | |
| SC11 | Neo⁺WT⁺ | 0 | 0 | 0 | 0 | 0 | | | | | | | | | |
| SC6 | Neo⁺WT⁺ | 0 | 0 | 0 | 0 | 0 | | | | | | | | | |
| SC9 | Neo⁺WT⁺ | 0 | 0 | 0 | 0 | 0 | | | | | | | | | |
| SD10 | Neo⁺WT⁺ | 0 | 0 | 0 | 0 | 0 | | | | | | | | | |
| SD11 | Neo⁺WT⁺ | ITIH6- | ITIH6- | 0 | 0 | 0 | | | | | 20-1*01 | CSARSEKSG | | | 3634 |
| | | RLG_G3V | RLG | | | | | | | | | ANVLTF | | | |
| SD4 | Neo⁺WT⁺ | CNKSR1- | CNKSR1- | 0 | 0 | 0 | | | | | | | | | |
| | | SLA_A9V | SLA | | | | | | | | | | | | |
| SD6 | Neo⁺WT⁺ | HCV- | HCV- | 0 | 0 | 0 | 38-1*01 | CAFIWNDYK | | | 19*01 | CASSSGGG | | | 3141 |
| | | KLV(PE) | KLV(APC) | | | | | LSF | | | | QPQHF | | | 3635 |
| SE10 | Neo⁺WT⁺ | STOX1- | STOX1- | 0 | 0 | 0 | 17*01 | CATDAEDSN | | | 27*01 | CASSSSSGD | | | 3142 |
| | | RLM_M3I | RLM | | | | | YQLIW | | | | EQYF | | | 3636 |
| SE12 | Neo⁺WT⁺ | PGM5- | 0 | 0 | 0 | 0 | | | | | | | | | |
| | | AVG_H5Y | | | | | | | | | | | | | |
| SE7 | Neo⁺WT⁺ | TBX3- | TBX3- | 0 | 0 | 0 | 14/ | CAMREAFAG | | | 10-3*01 | CAISELDWG | | | 3143 |
| | | GMG | GMG_T8M | | | | DV4*01 | TASKLTF | | | | VSSPLHF | | | 3637 |
| SF11 | Neo⁺WT⁺ | HTR1F- | HTR1F-9 | 0 | 0 | 0 | 5*01 | CAEIGVGGY | | | 6-5*01 | CATSPSLGT | | | 3144 |
| | | 9_V1M | | | | | | QKVTF | | | | QYF | | | 3638 |
| SF12 | Neo⁺WT⁺ | GABRG3- | GABRG3-YVT | 0 | 0 | 0 | | | | | | | | | |
| | | YVT_L7I | | | | | | | | | | | | | |
| SF5 | Neo⁺WT⁺ | BTBD1- | BTBD1- | 0 | 0 | 0 | | | | | | | | | |
| | | FML_LI | FML | | | | | | | | | | | | |
| SF7 | Neo⁺WT⁺ | 0 | 0 | 0 | 0 | 0 | | | | | | | | | |
| SG7 | Neo⁺WT⁺ | 0 | 0 | 0 | 0 | 0 | | | | | | | | | |
| SH4 | Neo⁺WT⁺ | OR6F1- | OR6F1- | 0 | 0 | 0 | | | | | 15*01 | CATSKTADR | | | 3639 |
| | | VLN_T8M | VLN | | | | | | | | | SPYEQYF | | | |
| SH6 | Neo⁺WT⁺ | OR6F1- | OR6F1- | 0 | 0 | 0 | 29/ | CAASGAGGT | | | 3-1*01 | CASSQEGRQ | | | 3145 |
| | | VLN_T8M | VLN | | | | DV5*01 | SYGKLTF | | | | GSYNEQFF | | | 3640 |
| SH9 | Neo⁺WT⁺ | 0 | 0 | 0 | 0 | 0 | | | | | | | | | |
| GA1 | Neo⁺WT⁻ | HTR1F- | 0 | 0 | 0 | 0 | 19*01 | CALSEASRD | | | 19*01 | CASRPGQVV | | | 3146 |
| | | 10_V1M | | | | | | FQKLVF | | | | YGYTF | | | 3641 |
| GA5 | Neo⁺WT⁻ | ITIH6- | 0 | 0 | 0 | 0 | | | | | 5-1*01 | CASSLKTDS | | | 3642 |
| | | RLG_G3V | | | | | | | | | | TPLQETQYF | | | |
| GA7 | Neo⁺WT⁻ | 0 | 0 | 0 | 0 | 0 | | | | | | | | | |
| GA9 | Neo⁺WT⁻ | SEC24A- | 0 | 0 | 0 | 0 | 38-2/ | CAYTSNDMR | | | 4-2*01 | CASSQGTSG | | | 3147 |
| | | FLY_P5L | | | | | DV8*01 | F | | | | TDTQYF | | | 3646 |
| GB11 | Neo⁺WT⁻ | PIGN- | 0 | 0 | 0 | 0 | 12-2*01 | CAVPLAGGT | | | 30*01 | CAWSWTVN | | | 3148 |
| | | FLT_P7H | | | | | | SYGKLTF | | | | TEAFF | | | 3644 |
| GB12 | Neo⁺WT⁻ | ERBB2- | 0 | 0 | 0 | 0 | 19*01 | CALSEAGYS | | | 29-1*01 | CSVVGTGSV | | | 3149 |
| | | ALI_H8Y | | | | | | SASKIIF | | | | ITNEKLFF | | | 3645 |
| GB9 | Neo⁺WT⁻ | ATP6AP1- | 0 | 0 | 0 | 0 | 35*01 | CAGLPDQTG | | | | | | | 3150 |
| | | KLG_G3W | | | | | | ANNLFF | | | | | | | |
| GC2 | Neo⁺WT⁻ | PHKA2- | 0 | 0 | 0 | 0 | | | | | | | | | |
| | | LLS_SF | | | | | | | | | | | | | |
| GC4 | Neo⁺WT⁻ | SEC24A- | 0 | 0 | 0 | 0 | 22*01 | CAVAYSGGG | | | 7-9*01 | CASSSDLRT | | | 3151 |
| | | FLY_P5L | | | | | | ADGLTF | | | | NYNEQFF | | | 3646 |
| GC6 | Neo⁺WT⁻ | SEC24A- | 0 | 0 | 0 | 0 | 12-1*01 | CVVNGNND | 41*01 | CAVEGSRL | 4-1*01 | CASSQDEGY | | | 3152 |
| | | FLY_P5L | | | | | | MRF | | TF | | EQYF | | | 3025 |
| | | | | | | | | | | | | | | | 3647 |
| GC9 | Neo⁺WT⁻ | OR6F1- | 0 | 0 | 0 | 0 | 12-2*01 | CAASSSNTG | | | 4-2*01 | CASSQDLNE | | | 3153 |
| | | VLN_T8M | | | | | | KLIF | | | | QYF | | | 3648 |
| GD11 | Neo⁺WT⁻ | OR10A3- | 0 | 0 | 0 | 0 | 8-6*01 | CAVSDLAGQ | | | 19*01 | CASSPVGDT | | | 3154 |
| | | ILI_V6F | | | | | | KLLF | | | | QYF | | | 3649 |
| GD3 | Neo⁺WT⁻ | PLXNB1- | 0 | 0 | 0 | 0 | 12-3*01 | CAMGDYKLS | | | | | | | 3155 |
| | | VLF_V1L | | | | | | F | | | | | | | |
| GD4 | Neo⁺WT⁻ | CLCN4- | 0 | 0 | 0 | 0 | 12-3*01 | CAMSAGNQ | | | 11-2*01 | CASSLDLAG | | | 3156 |
| | | LLA_G8V | | | | | | GGKLIF | | | | GFYEQYF | | | 3650 |
| GE4 | Neo⁺WT⁻ | 0 | 0 | 0 | 0 | 0 | 13-1*01 | CAASSPLNA | | | | | | | 3157 |
| | | | | | | | | GGTSYGKLT | | | | | | | |
| | | | | | | | | F | | | | | | | |
| GE5 | Neo⁺WT⁻ | CHST14- | 0 | 0 | 0 | 0 | | | | | | | | | |
| | | MLM_F4L | | | | | | | | | | | | | |
| GE6 | Neo⁺WT⁻ | DHX33- | 0 | 0 | 0 | 0 | | | | | 20-1*01 | CSARDPQGF | | | 3651 |
| | | LLA_M4I | | | | | | | | | | DGYTF | | | |
| GF11 | Neo⁺WT⁻ | PHKA2- | 0 | 0 | 0 | 0 | 41*01 | CAVEGSRLT | 12-2*01 | CAVRGGK | | | | | 3025 |
| | | LLS_SF | | | | | | F | | LTF | | | | | 3463 |
| GF4 | Neo⁺WT⁻ | IGF1- | 0 | 0 | 0 | 0 | | | | | | | | | |
| | | TMS_S4F | | | | | | | | | | | | | |
| GF5 | Neo⁺WT⁻ | KCNB2- | 0 | 0 | 0 | 0 | 12-2*01 | CAATGGSYI | | | 14*01 | CASSQAGEQ | | | 3158 |
| | | LLA_P6T | | | | | | PTF | | | | YF | | | 3652 |
| GF9 | Neo⁺WT⁻ | VN1R2- | 0 | 0 | 0 | 0 | 12-2*01 | CAVFGLSND | | | | | | | 3159 |
| | | LML_L3F | | | | | | YKLSF | | | | | | | |
| GG2 | Neo⁺WT⁻ | DHX33- | 0 | 0 | 0 | 0 | | | | | | | | | |
| | | LLA_M4I | | | | | | | | | | | | | |
| GG6 | Neo⁺WT⁻ | NOS1- | 0 | 0 | 0 | 0 | | | | | | | | | |
| | | FID_D3Y | | | | | | | | | | | | | |
| GG8 | Neo⁺WT⁻ | OR5M3- | 0 | 0 | 0 | 0 | 12-2*01 | CAVNAPDGQ | | | | | | | 3160 |
| | | KMV_T8N | | | | | | KLLF | | | | | | | |
| GG9 | Neo⁺WT⁻ | ZDHHC7- | 0 | 0 | 0 | 0 | 12-2*01 | CAVPEGNTP | | | 18*01 | CASSPYGNTI | | | 3161 |
| | | SLL_P7L | | | | | | LVF | | | | YF | | | 3653 |
| GH1 | Neo⁺WT⁻ | VN1R2- | 0 | 0 | 0 | 0 | | | | | 27*01 | CASSPPGTY | | | 3654 |
| | | LML_L3F | | | | | | | | | | NEQFF | | | |
| GH10 | Neo⁺WT⁻ | USP28- | 0 | 0 | 0 | 0 | | | | | 20-1*01 | CSVPSYNEQ | | | 3655 |
| | | LII_C5F | | | | | | | | | | FF | | | |
| GH12 | Neo⁺WT⁻ | C17orf75- | 0 | 0 | 0 | 0 | 1-2*01 | CAVVIGFGN | | | 5-1*01 | CASSTQGTG | | | 3162 |
| | | ALS_V7A | | | | | | VLHC | | | | VYNEQFF | | | 3656 |
| GH3 | Neo⁺WT⁻ | USP28- | 0 | 0 | 0 | 0 | | | | | | | | | |
| | | LII_C5F | | | | | | | | | | | | | |
| GH8 | Neo⁺WT⁻ | INTS1- | 0 | 0 | 0 | 0 | 12-2*01 | CAVNGYGNK | | | 15*01 | CATSRPTDW | | | 3163 |
| | | VLL_L3F | | | | | | LVF | | | | VETQYF | | | 3657 |
| IA1 | Neo⁺WT⁻ | WDR46- | 0 | 0 | 0 | 0 | 12-2*01 | CAVNQSGYS | | | 9*01 | CASSPTGNE | | | 3164 |
| | | FLT_T3I | | | | | | TLTF | | | | QFF | | | 3658 |
| IA11 | Neo⁺WT⁻ | OR5M3- | 0 | 0 | 0 | 0 | | | | | 6-6*01 | CASSYPSTG | | | 3659 |
| | | KMV_T8N | | | | | | | | | | SSYEQYF | | | |
| IA2 | Neo⁺WT⁻ | OR14C36- | 0 | 0 | 0 | 0 | 3*01 | CAVRDIDSN | | | 29-1*01 | CSVAGGTEA | | | 3165 |
| | | FML_V6L | | | | | | YQLIW | | | | FF | | | 3660 |
| IA3 | Neo⁺WT⁻ | OR6F1- | 0 | 0 | 0 | 0 | | | | | 20-1*01 | CSARGAFHE | | | 3661 |
| | | VLN_T8M | | | | | | | | | | QYF | | | |
| IA6 | Neo⁺WT⁻ | ATP6AP1- | 0 | 0 | 0 | 0 | | | | | | | | | |
| | | KLG_G3W | | | | | | | | | | | | | |
| IA7 | Neo⁺WT⁻ | VN1R2- | 0 | 0 | 0 | 0 | | | | | 12-3*01, | CASSIQGALT | | | 3662 |
| | | LML_L3F | | | | | | | | | 12-4*01 | DTQYF | | | |
| IB12 | Neo⁺WT⁻ | ATP6AP1- | 0 | 0 | 0 | 0 | 3*01 | CAVRDIGDN | | | 4-1*01 | CASSPSQGY | | | 3166 |
| | | KLG_G3W | | | | | | NDMRF | | | | GYTF | | | 3663 |
| IB2 | Neo⁺WT⁻ | MLL2- | 0 | 0 | 0 | 0 | | | | | | | | | |
| | | ALS_L8H | | | | | | | | | | | | | |
| IB8 | Neo⁺WT⁻ | MAR11- | 0 | 0 | 0 | 0 | 29/ | CAASESNFG | | | | | | | 3167 |
| | | 9_F1L | | | | | DV5*01 | NEKLTF | | | | | | | |
| IB9 | Neo⁺WT⁻ | SLC16A7- | 0 | 0 | 0 | 0 | | | | | | | | | |
| | | AMA_P6L | | | | | | | | | | | | | |
| IC1 | Neo⁺WT⁻ | MLL2- | 0 | 0 | 0 | 0 | 40*01 | CLLGDNNDM | 41*01 | CAVGEETS | 6-2*01, | CASSYFLEQ | | | 3168 |
| | | ALS_L8H | | | | | | RF | | GSRLTF | 6-3*01 | YF | | | 3464 |
| | | | | | | | | | | | | | | | 3664 |
| IC12 | Neo⁺WT⁻ | GOLGA3- | 0 | 0 | 0 | 0 | 8-3*01 | CAVGAWDS | | | 19*01 | CASSIGGQR | | | 3169 |
| | | SLD_P4L | | | | | | GGSNYKLTF | | | | YNEQFF | | | 3665 |
| IC4 | Neo⁺WT⁻ | OR14C36- | 0 | 0 | 0 | 0 | | | | | | | | | |
| | | FML_V6L | | | | | | | | | | | | | |
| IC5 | Neo⁺WT⁻ | SEC24A- | 0 | 0 | 0 | 0 | 19*01 | CALSEAGSW | | | | | | | 3170 |
| | | FLY_P5L | | | | | | GNTPLVF | | | | | | | |
| IC7 | Neo⁺WT⁻ | ZDHHC7- | 0 | 0 | 0 | 0 | | | | | | | | | |
| | | SLL_P7L | | | | | | | | | | | | | |
| ID1 | Neo⁺WT⁻ | DHX33- | 0 | 0 | 0 | 0 | | | | | | | | | |
| | | LLA_M4I | | | | | | | | | | | | | |
| ID10 | Neo⁺WT⁻ | ATP6AP1- | 0 | 0 | 0 | 0 | | | | | | | | | |
| | | KLG_G3W | | | | | | | | | | | | | |
| ID12 | Neo⁺WT⁻ | USP28- | 0 | 0 | 0 | 0 | 12-2*01 | CAVSGGYNK | | | 10-1*01 | CASSGGGA | | | 3171 |
| | | LII_C5F | | | | | | LIF | | | | GNEQFF | | | 3666 |
| ID4 | Neo⁺WT⁻ | TEAD1- | 0 | 0 | 0 | 0 | | | | | 6-1*01 | CASSEGQGY | | | 3667 |
| | | VLE_L8F | | | | | | | | | | EQYF | | | |
| ID8 | Neo⁺WT⁻ | HAUS3- | 0 | 0 | 0 | 0 | 8-4*01 | CALAGGGAD | | | 13*01 | CASSPYGQG | | | 3172 |
| | | ILN_T7A | | | | | | GLTF | | | | GRDTEAFF | | | 3668 |
| IE5 | Neo⁺WT⁻ | CD47- | 0 | 0 | 0 | 0 | 21*01 | CAVIYNFNKF | | | 2*01 | CASKSNTEA | | | 3173 |
| | | GLT_V6F | | | | | | YF | | | | FF | | | 3669 |
| IF1 | Neo⁺WT⁻ | ATP6AP1- | 0 | 0 | 0 | 0 | | | | | | | | | |
| | | KLG_G3W | | | | | | | | | | | | | |
| IF11 | Neo⁺WT⁻ | ITIH6- | 0 | 0 | 0 | 0 | | | | | | | | | |
| | | RLG_G3V | | | | | | | | | | | | | |
| IF5 | Neo⁺WT⁻ | HAUS3- | 0 | 0 | 0 | 0 | 27*01 | CAGDQNTG | | | 5-6*01 | CASSPTGSY | | | 3174 |
| | | ILN_T7A | | | | | | NQFYF | | | | GYTF | | | 3670 |
| IG11 | Neo⁺WT⁻ | PGM5- | 0 | 0 | 0 | 0 | 19*01 | CALSPRSSN | | | | | | | 3175 |
| | | AVG_H5Y | | | | | | TGKLIF | | | | | | | |
| IG6 | Neo⁺WT⁻ | TRPV3- | 0 | 0 | 0 | 0 | 21*01 | CAVKGGGA | | | 5-4*01 | CASGTELMN | | | 3176 |
| | | LLL_A8V | | | | | | DGLTF | | | | TEAFF | | | 3671 |
| IG7 | Neo⁺WT⁻ | ITIH6- | 0 | 0 | 0 | 0 | | | | | | | | | |
| | | RLG_G3V | | | | | | | | | | | | | |
| IH10 | Neo⁺WT⁻ | 0 | 0 | 0 | 0 | 0 | | | | | 25-1*01 | CASSETGYA | | | 3672 |
| | | | | | | | | | | | | YEQYF | | | |
| IH2 | Neo⁺WT⁻ | SMARCD3- | HTR1F- | GP100- | 0 | 0 | | | | | 19*01 | CATRDSQSS | | | 3673 |
| | | KLF_H8Y | 10_V1M | ALL | | | | | | | | YEQYF | | | |
| IH4 | Neo⁺WT⁻ | ATP6AP1- | 0 | 0 | 0 | 0 | 16*01 | CALSTGNQF | | | 9*01 | CASSAGQGY | | | 3177 |
| | | KLG_G3W | | | | | | YF | | | | EQYF | | | 3674 |
| IH6 | Neo⁺WT⁻ | MPV17- | 0 | 0 | 0 | 0 | 19*01 | CALKTYSNY | | | 7-9*01 | CASSLASQV | | | 3178 |
| | | YLW_A5P | | | | | | QLIW | | | | ETQYF | | | 3675 |
| JA11 | Neo⁺WT⁻ | HAUS3- | 0 | 0 | 0 | 0 | 12-2*01 | CAGFGGYQ | | | 30*01 | CAWSHSGG | | | 3179 |
| | | ILN_T7A | | | | | | KVTF | | | | YEQYF | | | 3676 |
| JA5 | Neo⁺WT⁻ | PIGN- | 0 | 0 | 0 | 0 | 12-2*01 | CAVNSNYQL | | | 20-1*01 | CSGDAFF | | | 3180 |
| | | FLT_P7H | | | | | | IW | | | | | | | 3677 |
| JA9 | Neo⁺WT⁻ | ATP6AP1- | 0 | 0 | 0 | 0 | 12-2*01 | CAVNMYGG | | | 2*01 | CASTPGTEA | | | 3181 |
| | | KLG_G3W | | | | | | YQKVTF | | | | FF | | | 3678 |
| JB10 | Neo⁺WT⁻ | INTS1- | 0 | 0 | 0 | 0 | 8-4*01 | CAVSEWDD | | | 10-2*01 | CASSDGRAD | | | 3182 |
| | | VLL_L3F | | | | | | MRF | | | | TQYF | | | 3679 |
| JB2 | Neo⁺WT⁻ | OR14C36- | 0 | 0 | 0 | 0 | | | | | | | | | |
| | | FML_V6L | | | | | | | | | | | | | |
| JB3 | Neo⁺WT⁻ | OR14C36- | 0 | 0 | 0 | 0 | 39*01 | CAVDSGGG | 27*01 | CAGADTN | 5-4*01 | CASSWLNTE | | | 3183 |
| | | FML_V6L | | | | | | ADGLTF | | AGKSTF | | AFF | | | 3465 |
| | | | | | | | | | | | | | | | 3680 |
| JB5 | Neo⁺WT⁻ | ATP6AP1- | 0 | 0 | 0 | 0 | 19*01 | CALSEAEGN | | | 9*01 | CASSVGGGS | | | 3184 |
| | | KLG_G3W | | | | | | TPLVF | | | | NQPQHF | | | 3681 |
| JC11 | Neo⁺WT⁻ | GANAB- | 0 | 0 | 0 | 0 | | | | | 2*01 | CASSGVAEW | | | 3682 |
| | | ALY_S5F | | | | | | | | | | ALETQYF | | | |
| JC8 | Neo⁺WT⁻ | TRPC1- | 0 | 0 | 0 | 0 | 2*01 | CAVEDRGG | | | 12-3*01, | CASRNTGTT | | | 3185 |
| | | MLL_Q5H | | | | | | NTGFQKLVF | | | 12-4*01 | NEKLFF | | | 3683 |
| JD10 | Neo⁺WT⁻ | DCHS1- | 0 | 0 | 0 | 0 | | | | | | | | | |
| | | TLF_I5M | | | | | | | | | | | | | |
| JD12 | Neo⁺WT⁻ | 0 | 0 | 0 | 0 | 0 | 17*01 | CATDLWSGA | | | 13*01 | CASSPTLAD | | | 3186 |
| | | | | | | | | GNMLTF | | | | EQYF | | | 3684 |
| JD8 | Neo⁺WT⁻ | ATP6AP1- | 0 | 0 | 0 | 0 | | | | | | | | | |
| | | KLG_G3W | | | | | | | | | | | | | |
| JE11 | Neo⁺WT⁻ | MPV17- | 0 | 0 | 0 | 0 | | | | | | | | | |
| | | YLW_A5P | | | | | | | | | | | | | |
| JF3 | Neo⁺WT⁻ | APBB2- | 0 | 0 | 0 | 0 | | | | | | | | | |
| | | VQY_L7F | | | | | | | | | | | | | |
| JF5 | Neo⁺WT⁻ | CELSR1- | SHROOM2- | 0 | 0 | 0 | 24*01 | CAPVSGGGA | 14/ | CAMREPY | 5-6*01 | CASSLPDRG | | | 3187 |
| | | YLF_F3L | KLL_D6V | | | | | DGLTF | DV4*01 | NAGNMLT | | GTKNIQYF | | | 3466 |
| | | | | | | | | | | F | | | | | 3685 |
| JF9 | Neo⁺WT⁻ | RYR3- | 0 | 0 | 0 | 0 | 14/ | CAMRALYYG | | | 3-1*01 | CASSLLGQS | | | 3188 |
| | | VLN_E6K | | | | | DV4*01 | KLTF | | | | TNEKLFF | | | 3686 |
| JG11 | Neo⁺WT⁻ | TRPV4- | 0 | 0 | 0 | 0 | 12-2*01 | CAVNGGWG | | | 29-1*01 | CSVDLGTEE | | | 3189 |
| | | FMI_A6T | | | | | | KLQF | | | | TQYF | | | 3687 |
| JG5 | Neo⁺WT⁻ | MPV17- | 0 | 0 | 0 | 0 | | | | | | | | | |
| | | YLW_A5P | | | | | | | | | | | | | |
| JG6 | Neo⁺WT⁻ | ATP6AP1- | 0 | 0 | 0 | 0 | | | | | | | | | |
| | | KLG_G3W | | | | | | | | | | | | | |
| JG7 | Neo⁺WT⁻ | OR14C36- | 0 | 0 | 0 | 0 | 22*01 | CAGALAFND | | | 6-4*01 | CASSPAVGT | 4-1*01 | CASSQEQ | 3190 |
| | | FML_V6L | | | | | | MRF | | | | GDEKLFF | | LSTYEQYF | 3688 |
| JH11 | Neo⁺WT⁻ | OR14C36- | IPO9- | 0 | 0 | 0 | 3*01 | CAVRDPYNF | | | | | | | 3191 |
| | | FML_V6L | FSS_E4D | | | | | NKFYF | | | | | | | |
| JH3 | Neo⁺WT⁻ | HERC1- | 0 | 0 | 0 | 0 | | | | | | | | | |
| | | SLL_PS | | | | | | | | | | | | | |
| JH7 | Neo⁺WT⁻ | A2ML1- | 0 | 0 | 0 | 0 | 27*01 | CAGARRDDK | | | 9*01 | CASSEPGPW | | | 3192 |
| | | YLD_K7R | | | | | | IIF | | | | AFF | | | 3689 |
| KA12 | Neo⁺WT⁻ | TRIM16- | 0 | 0 | 0 | 0 | 22*01 | CAVKTSYDK | | | 11-3*01 | CASSVTSDQ | | | 3193 |
| | | RMA_R1T | | | | | | VIF | | | | TQYF | | | 3690 |
| KB2 | Neo⁺WT⁻ | ATP6AP1- | 0 | 0 | 0 | 0 | 12-2*01 | CAVTTTSGG | | | | | | | 3194 |
| | | KLG_G3W | | | | | | YQKVTF | | | | | | | |
| KB9 | Neo⁺WT⁻ | CDC37L1- | 0 | 0 | 0 | 0 | 8-1*01 | CAVNAGNTG | | | 13*01 | CASSFRGNT | | | 3195 |
| | | FLS_P6L | | | | | | KLIF | | | | GELFF | | | 3691 |
| KC3 | Neo⁺WT⁻ | PHKA2- | 0 | 0 | 0 | 0 | | | | | | | | | |
| | | LLS_SF | | | | | | | | | | | | | |
| KC6 | Neo⁺WT⁻ | KCNB2- | 0 | 0 | 0 | 0 | 12-2*01 | CAVSNDYKL | | | 3-1*01 | CASSPTGTG | | | 3196 |
| | | LLA_P6T | | | | | | SF | | | | GSDTQYF | | | 3692 |
| KC8 | Neo⁺WT⁻ | HAUS3- | 0 | 0 | 0 | 0 | 12-2*01 | CAVQGGGA | | | 13*01 | CASSFMTEA | | | 3197 |
| | | ILN_T7A | | | | | | DGLTF | | | | GELFF | | | 3693 |
| KD4 | Neo⁺WT⁻ | MRM1- | 0 | 0 | 0 | 0 | 8-1*01 | CAVIANNND | | | 19*01 | CASDSGSGQ | | | 3198 |
| | | 9_T6P | | | | | | MRF | | | | PQHF | | | 3694 |
| KD7 | Neo⁺WT⁻ | GLRA1- | KCNB2- | 0 | 0 | 0 | | | | | 6-5*01 | CASFNTGEL | | | 3695 |
| | | LIF_F6L | LLA_P6T | | | | | | | | | FF | | | |
| KE1 | Neo⁺WT⁻ | PRSS16- | 0 | 0 | 0 | 0 | | | | | 20-1*01 | CSARDPVGG | | | 3696 |
| | | LLL_L1Q | | | | | | | | | | SNTGELFF | | | |
| KE10 | Neo⁺WT⁻ | HAUS3- | 0 | 0 | 0 | 0 | 22*01F | QGGKLIF | 14/ | CAIPPSGT | | | | | 3199 |
| | | ILN_T7A | | | | | | | DV4*01 | YKYIF | | | | | 3467 |
| KE11 | Neo⁺WT⁻ | ZDHHC7- | 0 | 0 | 0 | 0 | 1-1*01 | CAAWNTGF | | | | | | | 3200 |
| | | SLL_P7L | | | | | | QKLVF | | | | | | | |
| KE2 | Neo⁺WT⁻ | ITIH6- | 0 | 0 | 0 | 0 | | | | | | | | | |
| | | RLG_G3V | | | | | | | | | | | | | |
| KE6 | Neo⁺WT⁻ | DCHS1- | PELP1- | 0 | 0 | 0 | 12-2*01 | CAVNVNDYK | | | 9*01 | CASSPTAEA | | | 3201 |
| | | TLF_I5M | LVL_L3F | | | | | LSF | | | | FF | | | 3697 |
| KF3 | Neo⁺WT⁻ | C17orf75- | 0 | 0 | 0 | 0 | | | | | | | | | |
| | | ALS_V7A | | | | | | | | | | | | | |
| KF5 | Neo⁺WT⁻ | 0 | 0 | 0 | 0 | 0 | 13-1*01 | CAASWEQG | | | 3-1*01 | CASSQDRGR | | | 3202 |
| | | | | | | | | SNYKLTF | | | | DQETQYF | | | 3698 |
| KF6 | Neo⁺WT⁻ | INTS1- | 0 | 0 | 0 | 0 | 39*01 | CAPSAGGGS | | | 2*01 | CASSPLGLA | | | 3203 |
| | | VLL_L3F | | | | | | EKLVF | | | | EQETQYF | | | 3699 |
| KG10 | Neo⁺WT⁻ | KCNB2- | MAR11- | 0 | 0 | 0 | 9-2 | CALSDPGFG | | | 7-9*01 | CASSLVRDR | | | 3204 |
| | | LLA_P6T | 9_F1L | | | | | NVLHC | | | | HTEAFF | | | 3700 |
| KG11 | Neo⁺WT⁻ | DHX33- | 0 | 0 | 0 | 0 | 29/ | YQLTF | 8-6*01 | CAVIDPAR | | | | | 3205 |
| | | LLA_K5T | | | | | DV5*01F | | | ARLMF | | | | | 3468 |
| KG12 | Neo⁺WT⁻ | C3orf58- | ST6GALNAC2- | 0 | 0 | 0 | | | | | 7-9*01 | CASGGDAYE | | | 3701 |
| | | LMV_L4P | LLF_Y6H | | | | | | | | | QYF | | | |
| KG6 | Neo⁺WT⁻ | GOLGA3- | 0 | 0 | 0 | 0 | 21*01 | CAVRSYNTD | | | 6-6*01 | CASTPGTSA | 7-3*01 | RASSFTAP | 3206 |
| | | SLD_P4L | | | | | | KLIF | | | | SRDTQYF | | GLQYNEQ | 3702 |
| | | | | | | | | | | | | | | FF | |
| KH11 | Neo⁺WT⁻ | ATP6AP1- | 0 | 0 | 0 | 0 | 8-3*01 | CAVDETTDS | | | 4-1*01 | CASSPGTAY | | | 3207 |
| | | KLG_G3W | | | | | | WGKLQF | | | | EQYF | | | 3703 |
| KH6 | Neo⁺WT⁻ | DRAM1- | 0 | 0 | 0 | 0 | | | | | | | | | |
| | | FII_I3F | | | | | | | | | | | | | |
| KH7 | Neo⁺WT⁻ | 0 | 0 | 0 | 0 | 0 | 8-3*01 | CAHLSGGYN | | | 13*01 | CASSLSADT | | | 3208 |
| | | | | | | | | KLIF | | | | QYF | | | 3704 |
| LA3 | Neo⁺WT⁻ | LCP1- | 0 | 0 | 0 | 0 | 17*01 | CATDANNAG | | | 2*01 | CASSDGNEQ | | | 3209 |
| | | NLF_PL | | | | | | NMLTF | | | | FF | | | 3705 |
| LA6 | Neo⁺WT⁻ | OR9Q2- | 0 | 0 | 0 | 0 | 19*01 | CALSEEADN | 36/ | CAVGRYD | 6-1*01 | CASDSNYGY | | | 3210 |
| | | SID_S1F | | | | | | NDMRF | DV7*01 | YKLSF | | TF | | | 3469 |
| | | | | | | | | | | | | | | | 3706 |
| LB2 | Neo⁺WT⁻ | ATP6AP1- | 0 | 0 | 0 | 0 | 38-2/ | CAYRRMVS | 22*01 | CAVGSQG | 4-1*01 | CASSPGTGY | | | 3211 |
| | | KLG_G3W | | | | | DV8*01 | GGSNYKLTF | | GSEKLVF | | EQYF | | | 3470 |
| | | | | | | | | | | | | | | | 3707 |
| LB5 | Neo⁺WT⁻ | 0 | 0 | 0 | 0 | 0 | 38-2/ | CAYREGAQK | | | | | | | 3212 |
| | | | | | | | DV8*01 | LVF | | | | | | | |
| LB7 | Neo⁺WT⁻ | ATP6AP1- | 0 | 0 | 0 | 0 | | | | | 9*01 | CASSVAGGY | | | 3708 |
| | | KLG_G3W | | | | | | | | | | EQYF | | | |
| LC4 | Neo⁺WT⁻ | A2ML1- | 0 | 0 | 0 | 0 | 8-3*01 | CAVGSPDYK | | | 7-9*01 | CASSWDRG | | | 3213 |
| | | YLD_K7R | | | | | | LSF | | | | TYEQYF | | | 3709 |
| LD12 | Neo⁺WT⁻ | GANAB- | 0 | 0 | 0 | 0 | 39*01 | CAVVQTSGS | | | 13*01 | CASSWRRG | | | 3214 |
| | | ALY_S5F | | | | | | RLTF | | | | TDTQYF | | | 3710 |
| LD2 | Neo⁺WT⁻ | VN1R2- | 0 | 0 | 0 | 0 | 17*01 | CATDAWGH | | | 5-4*01 | CASSLEFGA | | | 3215 |
| | | LML_L3F | | | | | | GGSQGNLIF | | | | DTQYF | | | 3711 |
| LD5 | Neo⁺WT⁻ | HAUS3- | 0 | 0 | 0 | 0 | | | | | | | | | |
| | | ILN_T7A | | | | | | | | | | | | | |
| LD6 | Neo⁺WT⁻ | PIGN- | 0 | 0 | 0 | 0 | 38-2/ | CAYRSDGD | | | 6-1*01 | CASSRTGSL | | | 3216 |
| | | FLT_P7H | | | | | DV8*01 | MRF | | | | NYGYTF | | | 3712 |
| LE12 | Neo⁺WT⁻ | TEAD1- | 0 | 0 | 0 | 0 | 3*01 | CAVRDGGSA | | | 11-2*01 | CASSSQELT | | | 3217 |
| | | VLE_L8F | | | | | | SKIIF | | | | EAFF | | | 3713 |
| LE4 | Neo⁺WT⁻ | 0 | 0 | 0 | 0 | 0 | 14/ | CAMRERGY | | | | | | | 3218 |
| | | | | | | | DV4*01 | STLTF | | | | | | | |
| LE6 | Neo⁺WT⁻ | CLCN4- | CLCN4- | 0 | 0 | 0 | 12-3*01 | CAMSLSNFG | | | 6-1*01 | CASSEKPDT | | | 3219 |
| | | LLA_G8V | LLA | | | | | NEKLTF | | | | QYF | | | 3714 |
| LE8 | Neo⁺WT⁻ | ATP6AP1- | 0 | 0 | 0 | 0 | 22*01 | CAVVKTSYD | | | 4-1*01 | CASSPGQGY | | | 3220 |
| | | KLG_G3W | | | | | | KVIF | | | | EQYF | | | 3715 |
| LF7 | Neo⁺WT⁻ | HAUS3- | 0 | 0 | 0 | 0 | | | | | | | | | |
| | | ILN_T7A | | | | | | | | | | | | | |
| LG11 | Neo⁺WT⁻ | PIGN- | 0 | 0 | 0 | 0 | 12-2*01 | CAVPRNSGN | | | 13*01 | CASSTLIGSG | | | 3221 |
| | | FLT_P7H | | | | | | TPLVF | | | | NTIYF | | | 3716 |
| LG7 | Neo⁺WT⁻ | ATP6AP1- | 0 | 0 | 0 | 0 | 12-2*01 | CAVNDGTAS | | | 4-1*01 | CASSQVVVG | | | 3222 |
| | | KLG_G3W | | | | | | KLTF | | | | YGYTF | | | 3717 |
| LH1 | Neo⁺WT⁻ | USP28- | 0 | 0 | 0 | 0 | | | | | | | | | |
| | | LII_C5F | | | | | | | | | | | | | |
| LH3 | Neo⁺WT⁻ | ITIH6- | 0 | 0 | 0 | 0 | | | | | | | | | |
| | | RLG_G3V | | | | | | | | | | | | | |
| LH5 | Neo⁺WT⁻ | PIGN- | 0 | 0 | 0 | 0 | | | | | 20-1*01 | CSARTGIGP | | | 3718 |
| | | FLT_P7H | | | | | | | | | | YEQYF | | | |
| LH7 | Neo⁺WT⁻ | RYR3- | 0 | 0 | 0 | 0 | | | | | | | | | |
| | | VLN_E6K | | | | | | | | | | | | | |
| MA10 | Neo⁺WT⁻ | ATP6AP1- | 0 | 0 | 0 | 0 | 12-2*01 | CAVTVDDMR | | | 9*01 | CASSPAPAY | | | 3223 |
| | | KLG_G3W | | | | | | F | | | | EQYF | | | 3719 |
| MA4 | Neo⁺WT⁻ | TEAD1- | 0 | 0 | 0 | 0 | 3*01 | CAVSLLSGG | | | | | | | 3224 |
| | | SVL_L9F | | | | | | YNKLIF | | | | | | | |
| MA9 | Neo⁺WT⁻ | SMOX- | 0 | 0 | 0 | 0 | 12-2*01 | CAESLDTDK | | | 20-1*01 | CSARGGGFE | | | 3225 |
| | | KLA_KN | | | | | | LIF | | | | TQYF | | | 3720 |
| MB1 | Neo⁺WT⁻ | HAUS3- | DHX33- | 0 | 0 | 0 | 12-2*01 | CAVDNARLM | | | 19*01 | CASSMSGW | | | 3226 |
| | | ILN_T7A | LLA_M4I | | | | | F | | | | GDTQYF | | | 3721 |
| MB10 | Neo⁺WT⁻ | 0 | 0 | 0 | 0 | 0 | 12-2*01 | CAVNGGGS | | | | | | | 3227 |
| | | | | | | | | QGNLIF | | | | | | | |
| MB8 | Neo⁺WT⁻ | C17orf75- | 0 | 0 | 0 | 0 | 19*01 | CALSEIVPTS | | | 5-4*01 | CASSSPSGY | | | 3228 |
| | | ALS_V7A | | | | | | GTYKYIF | | | | EQYF | | | 3722 |
| MB9 | Neo⁺WT⁻ | INTS1- | 0 | 0 | 0 | 0 | 4*01 | CLVGDSWN | | | 20-1*01 | CSARWDRV | | | 3229 |
| | | VLL_L3F | | | | | | YGQNFVF | | | | SSSTDTQYF | | | 3723 |
| MC10 | Neo⁺WT⁻ | OR14C36- | 0 | 0 | 0 | 0 | 14/ | CAMGSGYAL | | | | | | | 3230 |
| | | FML_V6L | | | | | DV4*01 | NF | | | | | | | |
| MC12 | Neo⁺WT⁻ | SLC16A7- | HTR1F- | 0 | 0 | 0 | 1-2*01 | CAVRDYGQK | | | 4-1*01 | CASSPTPGT | | | 3231 |
| | | AMA_P6L | 9_V1M | | | | | LLF | | | | GETQYF | | | 3724 |
| MC4 | Neo⁺WT⁻ | HAUS3- | 0 | 0 | 0 | 0 | 12-2*01 | CAVTPGTALI | | | 6-5*01 | CASSRDGPS | | | 3232 |
| | | ILN_T7A | | | | | | F | | | | SYEQYF | | | 3725 |
| MC7 | Neo⁺WT⁻ | INTS1- | 0 | 0 | 0 | 0 | 21*01 | CAVKGNDM | | | 10-2*01 | CASSEGWV | | | 3233 |
| | | VLL_L3F | | | | | | RF | | | | DTQYF | | | 3726 |
| MC8 | Neo⁺WT⁻ | ATP6AP1- | 0 | 0 | 0 | 0 | 8-3*01 | CAVFMEYGN | | | 4-1*01 | CASSQATGY | | | 3234 |
| | | KLG_G3W | | | | | | KLVF | | | | EQYF | | | 3727 |
| MD1 | Neo⁺WT⁻ | ATP6AP1- | 0 | 0 | 0 | 0 | | | | | 9*01 | CASSPSGGV | | | 3728 |
| | | KLG_G3W | | | | | | | | | | YGYTF | | | |
| MD11 | Neo⁺WT⁻ | OR5M3- | 0 | 0 | 0 | 0 | | | | | 3-1*01 | CASSPPDGQ | | | 3729 |
| | | KMV_T8N | | | | | | | | | | GDYGYTF | | | |
| MD12 | Neo⁺WT⁻ | OR14C36- | 0 | 0 | 0 | 0 | | | | | 27*01 | CASSSLGGY | | | 3730 |
| | | FML_V6L | | | | | | | | | | EQYF | | | |
| MD7 | Neo⁺WT⁻ | ATP6AP1- | 0 | 0 | 0 | 0 | 30*01 | CGTGGAGD | | | 9*01 | CASSVSTNY | | | 3235 |
| | | KLG_G3W | | | | | | YKLSF | | | | EQYF | | | 3731 |
| MD9 | Neo⁺WT⁻ | ATP6AP1- | 0 | 0 | 0 | 0 | 6*01 | CAPFNTDKLI | | | 20-1*01 | CSARDVGIS | | | 3236 |
| | | KLG_G3W | | | | | | F | | | | YEQYF | | | 3732 |
| ME1 | Neo⁺WT⁻ | KCNB2- | 0 | 0 | 0 | 0 | 3*01 | CAVRVGGD | | | 28*01 | CASTVRQGS | | | 3237 |
| | | LLA_P6T | | | | | | MRF | | | | NQPQHF | | | 3733 |
| ME11 | Neo⁺WT⁻ | TRIM58- | ATP6AP1- | 0 | 0 | 0 | 12-2*01 | CAVDLEVGG | | | 4-1*01 | CASSPDRFY | | | 3238 |
| | | YMV_V3F | KLG_G3W | | | | | NKLVF | | | | EQYF | | | 3734 |
| ME12 | Neo⁺WT⁻ | INTS1- | 0 | 0 | 0 | 0 | 14/ | CAMRELLFG | | | 7-3*01 | CASSSPGQG | | | 3239 |
| | | VLL_L3F | | | | | DV4*01 | NEKLTF | | | | YYEQYF | | | 3735 |
| ME2 | Neo⁺WT⁻ | ATP6AP1- | 0 | 0 | 0 | 0 | | | | | | | | | |
| | | KLG_G3W | | | | | | | | | | | | | |
| ME4 | Neo⁺WT⁻ | SHROOM2- | 0 | 0 | 0 | 0 | 38-2/ | CAYSPYNNN | | | 6-5*01 | CASSYVNGG | | | 3240 |
| | | KLL_D6V | | | | | DV8*01 | DMRF | | | | AIGGELFF | | | 3736 |
| ME7 | Neo⁺WT⁻ | INTS1- | 0 | 0 | 0 | 0 | 12-3*01 | CASYSGGGA | | | 13*01 | CASSLGAGS | | | 3241 |
| | | VLL_L3F | | | | | | DGLTF | | | | YEQYF | | | 3737 |
| MF10 | Neo⁺WT⁻ | ITIH6- | 0 | 0 | 0 | 0 | 14/ | CAMREGPG | 29/ | CAAKWGN | 29-1*01 | CSVEEWDTS | | | 3242 |
| | | RLG_G3V | | | | | DV4*01 | NTPLVF | DV5*01 | NDMRF | | GNTIYF | | | 3471 |
| | | | | | | | | | | | | | | | 3738 |
| MF12 | Neo⁺WT⁻ | SSPN- | 0 | 0 | 0 | 0 | | | | | | | | | |
| | | LMA_S8F | | | | | | | | | | | | | |
| MF3 | Neo⁺WT⁻ | ATP6AP1- | 0 | 0 | 0 | 0 | | | | | 4-1*01 | CASSQGEGY | | | 3739 |
| | | KLG_G3W | | | | | | | | | | EQYF | | | |
| MF8 | Neo⁺WT⁻ | OR14C36- | 0 | 0 | 0 | 0 | 21*01 | CAVRPDGYA | | | 13*01 | CASNLGGDN | | | 3243 |
| | | FML_V6L | | | | | | LNF | | | | EQFF | | | 3740 |
| MF9 | Neo⁺WT⁻ | MLL2- | 0 | 0 | 0 | 0 | 8-6*01 | CAVISTGGT | | | 11-2*01 | CASSFSGTF | | | 3244 |
| | | ALS_L8H | | | | | | SYGKLTF | | | | EAFF | | | 3741 |
| MG11 | Neo⁺WT⁻ | ATP6AP1- | 0 | 0 | 0 | 0 | 41*01 | CAVGEDGQ | | | 4-1*01 | CASSPGQGY | | | 3245 |
| | | KLG_G3W | | | | | | NFVF | | | | EQYF | | | 3715 |
| MG5 | Neo⁺WT⁻ | ATP6AP1- | SLC2A4- | 0 | 0 | 0 | 12-2*01 | CAVAGVISG | | | 19*01 | CASSISPSSY | | | 3246 |
| | | KLG_G3W | ILI_A4T | | | | | TYKYIF | | | | EQYF | | | 3742 |
| MH1 | Neo⁺WT⁻ | VN1R5- | 0 | 0 | 0 | 0 | | | | | | | | | |
| | | MII_S7Y | | | | | | | | | | | | | |
| MH2 | Neo⁺WT⁻ | CD47- | 0 | 0 | 0 | 0 | 5*01 | CAERDGGFK | | | 13*01 | CASSPRTGF | | | 3247 |
| | | GLT_V6F | | | | | | TIF | | | | SSGNTIYF | | | 3743 |
| MH4 | Neo⁺WT⁻ | 0 | 0 | 0 | 0 | 0 | | | | | | | | | |
| MH6 | Neo⁺WT⁻ | OR10A3- | 0 | 0 | 0 | 0 | | | | | | | | | |
| | | ILI_V6F | | | | | | | | | | | | | |
| MH8 | Neo⁺WT⁻ | MRM1- | 0 | 0 | 0 | 0 | 20*01 | CAVIWYNNN | | | 6-5*01 | CASSYSGAE | | | 3248 |
| | | 9_T6P | | | | | | DMRF | | | | QYF | | | 3744 |
| NA12 | Neo⁺WT⁻ | SMARCD3- | 0 | 0 | 0 | 0 | 8-3*01 | CAVYSGGGA | | | | | | | 3075 |
| | | KLF_H8Y | | | | | | DGLTF | | | | | | | |
| NA8 | Neo⁺WT⁻ | VN1R5- | 0 | 0 | 0 | 0 | 19*01 | CALSDPLGR | | | 6-1*01 | CASSEFTRS | | | 3249 |
| | | MII_S7Y | | | | | | DDKIIF | | | | YEQYF | | | 3745 |
| NB1 | Neo⁺WT⁻ | MRM1- | 0 | 0 | 0 | 0 | 12-3*01 | CAPPRRDDK | 20*01 | CAVQGYS | 19*01 | CASSIAPGN | | | 3250 |
| | | 9_T6P | | | | | | IIF | | NDYKLSF | | EQYF | | | 3472 |
| | | | | | | | | | | | | | | | 3746 |
| NB10 | Neo⁺WT⁻ | 0 | 0 | 0 | 0 | 0 | 12-2*01 | CAVNRDDKII | | | 3-1*01 | CASSQYSLS | | | 3251 |
| | | | | | | | | F | | | | TDTQYF | | | 3748 |
| NB7 | Neo⁺WT⁻ | OR5M3- | 0 | 0 | 0 | 0 | 14/ | CAMGDNYG | | | 9*01 | CASSVVGAR | | | 3252 |
| | | KMV_T8N | | | | | DV4*01 | QNFVF | | | | TDTQYF | | | 3748 |
| NB9 | Neo⁺WT⁻ | TEAD1- | 0 | 0 | 0 | 0 | 14/ | CAMKGAGS | | | 2*01 | CASSDPRGQ | | | 3253 |
| | | SVL_L9F | | | | | DV4*01 | YQLTF | | | | PNQPQHF | | | 3749 |
| NC12 | Neo⁺WT⁻ | PHKA2- | 0 | 0 | 0 | 0 | 12-2*01 | CASRPDKLIF | | | 27*01 | CASSPGGYY | | | 3254 |
| | | LLS_SF | | | | | | | | | | GYTF | | | 3750 |
| NC2 | Neo⁺WT⁻ | DRAM1- | GCN1L1-9 | 0 | 0 | 0 | | | | | | | | | |
| | | FII_I3F | | | | | | | | | | | | | |
| NC3 | Neo⁺WT⁻ | OR14C36- | 0 | 0 | 0 | 0 | | | | | 7-9*01 | CASNTGYQE | | | 3751 |
| | | FML_V6L | | | | | | | | | | TQYF | | | |
| NC4 | Neo⁺WT⁻ | HAUS3- | 0 | 0 | 0 | 0 | 22*01 | CAVTDNYGQ | | | 6-5*01 | CASSYNQGY | | | 3255 |
| | | ILN_T7A | | | | | | NFVF | | | | EQYF | | | 3752 |
| ND4 | Neo⁺WT⁻ | PHKA2- | 0 | 0 | 0 | 0 | | | | | | | | | |
| | | LLS_SF | | | | | | | | | | | | | |
| NE2 | Neo⁺WT⁻ | 0 | 0 | 0 | 0 | 0 | 14/ | CAMREGDV | | | 9*01 | CASSVTPAD | | | 3256 |
| | | | | | | | DV4*01 | SF | | | | TQYF | | | 3753 |
| NE5 | Neo⁺WT⁻ | DHX33- | 0 | 0 | 0 | 0 | 12-2*01 | CALNNARLM | | | | | | | 3257 |
| | | LLA_M4I | | | | | | F | | | | | | | |
| NE6 | Neo⁺WT⁻ | ATP6AP1- | 0 | 0 | 0 | 0 | 12-2*01 | CAVNRDSGY | | | 4-1*01 | CASSLEDSA | | | 3258 |
| | | KLG_G3W | | | | | | ALNF | | | | NYGYTF | | | 3754 |
| NE9 | Neo⁺WT⁻ | GANAB- | 0 | 0 | 0 | 0 | 12-2*01 | CAVTTDSWG | | | 6-5*01 | CASSYSGQG | | | 3259 |
| | | ALY_S5F | | | | | | KLQF | | | | YTF | | | 3755 |
| NF3 | Neo⁺WT⁻ | RYR3- | 0 | 0 | 0 | 0 | | | | | | | | | |
| | | VLN_E6K | | | | | | | | | | | | | |
| NF6 | Neo⁺WT⁻ | COL18A1- | 0 | 0 | 0 | 0 | 4*01 | CLVARSYNN | | | 28*01 | CASSSGYNE | | | 3260 |
| | | VLL_S8F | | | | | | NDMRF | | | | QFF | | | 3756 |
| NF7 | Neo⁺WT⁻ | SREBF1- | 0 | 0 | 0 | 0 | 12-2*01 | CAVRGSGTY | | | 19*01 | CASSISTEAF | | | 3261 |
| | | YLQ_L6M | | | | | | KYIF | | | | F | | | 3757 |
| NF9 | Neo⁺WT⁻ | CD47- | 0 | 0 | 0 | 0 | 17*01 | CGAGNMLTF | 12-2*01 | CAVNTFTG | 28*01 | CASTKTGLG | | | 3262 |
| | | GLT_V6F | | | | | | | | GGNKLTF | | DQPQHF | | | 3473 |
| | | | | | | | | | | | | | | | 3758 |
| NG1 | Neo⁺WT⁻ | ATP6AP1- | 0 | 0 | 0 | 0 | 24*01 | CAFAGTYKYI | 8-6*01 | CAVKAGN | 9*01 | CASSVGGGE | | | 3263 |
| | | KLG_G3W | | | | | | F | | FGNEKLTF | | VEAFF | | | 3474 |
| | | | | | | | | | | | | | | | 3759 |
| NG11 | Neo⁺WT⁻ | HAUS3- | 0 | 0 | 0 | 0 | 38-2/ | CAYRTSYDK | | | 20-1*01 | CSAGIPGQV | | | 3264 |
| | | ILN_T7A | | | | | DV8*01 | VIF | | | | FSSNEKLFF | | | 3760 |
| NG6 | Neo⁺WT⁻ | TPP2- | 0 | 0 | 0 | 0 | | | | | | | | | |
| | | SLA_WL | | | | | | | | | | | | | |
| NG7 | Neo⁺WT⁻ | TRIM58- | 0 | 0 | 0 | 0 | 8-6*01 | CAAMGDSSY | | | 7-6*01 | CASSPYSGA | | | 3265 |
| | | YMV_V3F | | | | | | KLIF | | | | NVLTF | | | 3761 |
| NH1 | Neo⁺WT⁻ | ERBB2- | 0 | 0 | 0 | 0 | | | | | | | | | |
| | | ALI_H8Y | | | | | | | | | | | | | |
| NH12 | Neo⁺WT⁻ | NSDHL- | 0 | 0 | 0 | 0 | | | | | 9*01 | CASSLAGAD | | | 3762 |
| | | ILT_A9V | | | | | | | | | | NEQFF | | | |
| NH4 | Neo⁺WT⁻ | C3orf58- | 0 | 0 | 0 | 0 | 14/ | CAMSTLDQI | | | 2*01 | CASIPVGSR | | | 3266 |
| | | LMV_L4P | | | | | DV4*01 | QGAQKLVF | | | | NTIYF | | | 3763 |
| NH6 | Neo⁺WT⁻ | PELP1- | 0 | 0 | 0 | 0 | | | | | | | | | |
| | | RLH_L7F | | | | | | | | | | | | | |
| NH9 | Neo⁺WT⁻ | APBB2- | 0 | 0 | 0 | 0 | 12-2*01 | CAAAPNDYK | | | 28*01 | CASSLGQGY | | | 3267 |
| | | VQY_L7F | | | | | | LSF | | | | NEQFF | | | 3764 |
| OA6 | Neo⁺WT⁻ | DHX33- | TRIM16- | 0 | 0 | 0 | 12-2*01 | CAVNPGSQ | | | 3-1*01 | CASSQWGG | | | 3268 |
| | | LLA_K5T | RMA_R1T | | | | | GNLIF | | | | NEQFF | | | 3765 |
| OA8 | Neo⁺WT⁻ | HAUS3- | 0 | 0 | 0 | 0 | 26-2*01 | CILRDSSGG | | | 28*01 | CASAPGLNY | | | 3269 |
| | | ILN_T7A | | | | | | GADGLTF | | | | EQYF | | | 3766 |
| OB12 | Neo⁺WT⁻ | INTS1- | 0 | 0 | 0 | 0 | 39*01 | CAVDMRADS | | | | | | | 3270 |
| | | VLL_L3F | | | | | | NYQLIW | | | | | | | |
| OB9 | Neo⁺WT⁻ | 0 | 0 | 0 | 0 | 0 | | | | | | | | | |
| OC12 | Neo⁺WT⁻ | TRPV3- | 0 | 0 | 0 | 0 | 35*01 | CAGRSTGAG | | | 5-4*01 | CASSSESGE | | | 3271 |
| | | LLL_A8V | | | | | | SYQLTF | | | | LFF | | | 3767 |
| OC2 | Neo⁺WT⁻ | SMARCD3- | 0 | 0 | 0 | 0 | | | | | | | | | |
| | | KLF_H8Y | | | | | | | | | | | | | |
| OD10 | Neo⁺WT⁻ | SHROOM2- | 0 | 0 | 0 | 0 | 9-2*01 | CALSDRGAQ | | | | | | | 3272 |
| | | KLL_D6V | | | | | | KLVF | | | | | | | |
| OD2 | Neo⁺WT⁻ | OR5M3- | 0 | 0 | 0 | 0 | 3*01 | CAVSPLDGY | | | 2*01 | CASSEHRDH | | | 3273 |
| | | KMV_T8N | | | | | | NKLIF | | | | EQFF | | | 3768 |
| OD5 | Neo⁺WT⁻ | 0 | 0 | 0 | 0 | 0 | | | | | | | | | |
| OE11 | Neo⁺WT⁻ | PHKA2- | 0 | 0 | 0 | 0 | 12-2 | PYSSASKIIF | | | 6-1*01 | CASSVPGQG | | | 3274 |
| | | LLS_SF | | | | | | | | | | VLEQYF | | | 3769 |
| OE5 | Neo⁺WT⁻ | 0 | 0 | 0 | 0 | 0 | | | | | | | | | |
| OE7 | Neo⁺WT⁻ | 0 | 0 | 0 | 0 | 0 | 26-1*01 | CIVRLSNTG | | | 20-1*01 | CSARDRGSS | | | 3275 |
| | | | | | | | | NQFYF | | | | NEKLFF | | | 3770 |
| OF1 | Neo⁺WT⁻ | IGF1- | 0 | 0 | 0 | 0 | 23/ | CAARDPYNQ | | | 11-2*01 | CASSPDPSG | | | 3276 |
| | | TMS_S4F | | | | | DV6*01 | GGKLIF | | | | NEQFF | | | 3771 |
| OF2 | Neo⁺WT⁻ | 0 | 0 | 0 | 0 | 0 | | | | | | | | | |
| OF3 | Neo⁺WT⁻ | APBB2- | 0 | 0 | 0 | 0 | | | | | | | | | |
| | | VQY_L7F | | | | | | | | | | | | | |
| OG12 | Neo⁺WT⁻ | GANAB- | 0 | 0 | 0 | 0 | 8-3*01 | CAVVLTDSW | | | | | | | 3277 |
| | | ALY_S5F | | | | | | GKLQF | | | | | | | |
| OG2 | Neo⁺WT⁻ | 0 | 0 | 0 | 0 | 0 | | | | | | | | | |
| OH3 | Neo⁺WT⁻ | 0 | 0 | 0 | 0 | 0 | | | | | | | | | |
| OH6 | Neo⁺WT⁻ | VN1R2- | 0 | 0 | 0 | 0 | | | | | | | | | |
| | | LML_L3F | | | | | | | | | | | | | |
| SA5 | Neo⁺WT⁻ | OR10A3- | 0 | 0 | 0 | 0 | | | | | | | | | |
| | | ILI_V6F | | | | | | | | | | | | | |
| SA7 | Neo⁺WT⁻ | MPV17- | ITIH6- | 0 | 0 | 0 | 21*01 | CAVRPYDKV | | | 6-6*01 | CASSYGLEQ | | | 3278 |
| | | YLW_A5P | RLG_G3V | | | | | IF | | | | YF | | | 3772 |
| SA9 | Neo⁺WT⁻ | 0 | 0 | 0 | 0 | 0 | | | | | | | | | |
| SB8 | Neo⁺WT⁻ | ST6GALNAC2- | ST6GALNAC2- | 0 | 0 | 0 | 27*01 | CAGLDQPG | 12-2*01 | CAVNSGY | 5-4*01 | CASSLGQGT | | | 3279 |
| | | LLF_Y6H | LLF | | | | | GSYIPTF | | ALNF | | YEQYF | | | 3475 |
| | | | | | | | | | | | | | | | 3773 |
| SC3 | Neo⁺WT⁻ | HAUS3- | 0 | 0 | 0 | 0 | | | | | 5-6*01 | CASSSAGLP | | | 3774 |
| | | ILN_T7A | | | | | | | | | | EQYF | | | |
| SD5 | Neo⁺WT⁻ | DHX33- | 0 | 0 | 0 | 0 | | | | | 11-2*01 | CASSLDFQG | | | 3775 |
| | | LLA_K5T | | | | | | | | | | PRDF | | | |
| SD9 | Neo⁺WT⁻ | CD47- | 0 | 0 | 0 | 0 | | | | | 9*01 | CASSTGQGG | | | 3776 |
| | | GLT_V6F | | | | | | | | | | DTQYF | | | |
| SF9 | Neo⁺WT⁻ | 0 | 0 | 0 | 0 | 0 | | | | | | | | | |
| SG8 | Neo⁺WT⁻ | 0 | 0 | 0 | 0 | 0 | | | | | | | | | |
| SH12 | Neo⁺WT⁻ | 0 | 0 | 0 | 0 | 0 | | | | | | | | | |
| SH8 | Neo⁺WT⁻ | 0 | 0 | 0 | 0 | 0 | | | | | | | | | |
| GA11 | Neo⁻WT⁺ | HTR1F-10 | 0 | 0 | 0 | 0 | 10*01 | CVVSGGYQK | | | 6-6*01 | CASRRQATN | | | 3280 |
| | | | | | | | | VTF | | | | EKLFF | | | 3777 |
| GA3 | Neo⁻WT⁺ | 0 | 0 | 0 | 0 | 0 | | | | | 5-1*01 | CASSMDAYT | | | 3778 |
| | | | | | | | | | | | | EAFF | | | |
| GA4 | Neo⁻WT⁺ | OR5M3- | 0 | 0 | 0 | 0 | | | | | | | | | |
| | | KMV | | | | | | | | | | | | | |
| GA8 | Neo⁻WT⁺ | OR5M3- | 0 | 0 | 0 | 0 | 26-2*01 | CILNVPGGY | | | 7-9*01 | CASSSSGGL | | | 3281 |
| | | KMV | | | | | | QKVTF | | | | DTQYF | | | 3779 |
| GB10 | Neo⁻WT⁺ | SEC24A- | 0 | 0 | 0 | 0 | 29/ | CAASPATSG | | | 3-1*01 | CASSPRLAG | | | 3282 |
| | | FLY | | | | | DV5*01 | TYKYIF | | | | GKYNEQFF | | | 3780 |
| GB3 | Neo⁻WT⁺ | OR5M3- | 0 | 0 | 0 | 0 | 8-3*01 | CAVDRVTGG | | | | | | | 3283 |
| | | KMV | | | | | | GNKLTF | | | | | | | |
| GB5 | Neo⁻WT⁺ | 0 | 0 | 0 | 0 | 0 | | | | | 2*01 | CASSEERPG | | | 3781 |
| | | | | | | | | | | | | EGYTF | | | |
| GB6 | Neo⁻WT⁺ | ITIH6- | 0 | 0 | 0 | 0 | 4*01 | CLVVSNSSA | 1-1*01 | CAVSPGN | 19*01 | CASSIPSRTT | | | 3284 |
| | | RLG | | | | | | SKIIF | | TPLVF | | NYGYTF | | | 3476 |
| | | | | | | | | | | | | | | | 3782 |
| GC1 | Neo⁻WT⁺ | HTR1F-10 | 0 | 0 | 0 | 0 | 26-1*01 | CIVRAALYNN | | | | | | | 3285 |
| | | | | | | | | DMRF | | | | | | | |
| GC10 | Neo⁻WT⁺ | HTR1F-9 | 0 | 0 | 0 | 0 | 5*01 | CAETVNTGF | | | 2*01 | CARTGAGGN | | | 3286 |
| | | | | | | | | QKLVF | | | | TIYF | | | 3783 |
| GC11 | Neo⁻WT⁺ | 0 | 0 | 0 | 0 | 0 | 13-1*01 | CAANEKLVF | | | 19*01 | CASSIAPAYG | | | 3287 |
| | | | | | | | | | | | | YTF | | | 3784 |
| GC3 | Neo⁻WT⁺ | GCN1L1- | 0 | 0 | 0 | 0 | 12-2*01 | CAVKGMRF | | | 20-1*01 | CSARNRDTY | | | 3288 |
| | | 10 | | | | | | | | | | YNEQFF | | | 3785 |
| GC8 | Neo⁻WT⁺ | ITIH6- | ITIH6- | 0 | 0 | 0 | | | | | 28*01 | CASSFRRDT | | | 3786 |
| | | RLG | RLG_G3V | | | | | | | | | DTQYF | | | |
| GD12 | Neo⁻WT⁺ | RYR3- | 0 | 0 | 0 | 0 | 12-2*01 | CAGTHMRF | | | 7-9*01 | CASSSWTG | | | 3289 |
| | | VLN | | | | | | | | | | GNEQYF | | | 3787 |
| GD5 | Neo⁻WT⁺ | OR5M3- | 0 | 0 | 0 | 0 | | | | | | | | | |
| | | KMV | | | | | | | | | | | | | |
| GD9 | Neo⁻WT⁺ | PHKA2- | 0 | 0 | 0 | 0 | 5*01 | CAILPDSGA | | | 27*01 | CASSVPGTP | | | 3290 |
| | | LLS | | | | | | GSYQLTF | | | | NTEAFF | | | 3788 |
| GE10 | Neo⁻WT⁺ | OR5M3- | 0 | 0 | 0 | 0 | 34*01 | CGADNSGG | | | 7-9*01 | CASSLSWLD | | | 3291 |
| | | KMV | | | | | | GADGLTF | | | | SQETQYF | | | 3789 |
| GE12 | Neo⁻WT⁺ | SSPN-9 | 0 | 0 | 0 | 0 | 17*01 | CATDALSGT | | | 9*01 | CASSVDGTE | | | 3292 |
| | | | | | | | | YKYIF | | | | ETQYF | | | 3790 |
| GE7 | Neo⁻WT⁺ | ITIH6- | 0 | 0 | 0 | 0 | | | | | | | | | |
| | | RLG | | | | | | | | | | | | | |
| GE8 | Neo⁻WT⁺ | 0 | 0 | 0 | 0 | 0 | 14/ | CAMRESYNN | 38-2/ | CAYRSFSN | | | | | 3293 |
| | | | | | | | DV4*01 | NDMRF | DV8*01 | AGNNRKLI | | | | | 3477 |
| | | | | | | | | | | W | | | | | |
| GF8 | Neo⁻WT⁺ | 0 | 0 | 0 | 0 | 0 | | | | | | | | | |
| GG1 | Neo⁻WT⁺ | TBX3- | 0 | 0 | 0 | 0 | | | | | | | | | |
| | | GMG | | | | | | | | | | | | | |
| GG12 | Neo⁻WT⁺ | 0 | 0 | 0 | 0 | 0 | | | | | 7-9*01 | CASSLGGGI | | | 3791 |
| | | | | | | | | | | | | EAFF | | | |
| GG3 | Neo⁻WT⁺ | SHROOM2- | 0 | 0 | 0 | 0 | | | | | | | | | |
| | | KLL | | | | | | | | | | | | | |
| GG4 | Neo⁻WT⁺ | 0 | 0 | 0 | 0 | 0 | | | | | | | | | |
| GG7 | Neo⁻WT⁺ | LCP1- | 0 | 0 | 0 | 0 | 14/ | CALNNAGNM | | | 9*01 | CASSEWDTE | | | 3294 |
| | | NLF | | | | | DV4*01 | LTF | | | | AFF | | | 3792 |
| IA12 | Neo⁻WT⁺ | HOXC9- | 0 | 0 | 0 | 0 | 12-2*01 | CAVINSGAG | | | | | | | 3295 |
| | | YMY | | | | | | SYQLTF | | | | | | | |
| IA8 | Neo⁻WT⁺ | ITIH6- | 0 | 0 | 0 | 0 | 38-2/ | CAYRTQKLV | | | 6-5*01 | CASSAGTIYN | | | 3296 |
| | | RLG | | | | | DV8*01 | F | | | | EQFF | | | 3793 |
| IB10 | Neo⁻WT⁺ | OR5M3- | 0 | 0 | 0 | 0 | 19*01 | CALILTQGGS | | | 13*01 | CASSQVRDR | | | 3297 |
| | | KMV | | | | | | EKLVF | | | | DINYGYTF | | | 3794 |
| IB7 | Neo⁻WT⁺ | HAUS3- | 0 | 0 | 0 | 0 | 14/ | CARITGGGN | | | 2*01 | CASSGPRGY | | | 3298 |
| | | ILN | | | | | DV4*01 | KLTF | | | | TF | | | 3795 |
| IC11 | Neo⁻WT⁺ | HTR1F-10 | 0 | 0 | 0 | 0 | | | | | | | | | |
| IC2 | Neo⁻WT⁺ | OR5M3- | 0 | 0 | 0 | 0 | | | | | | | | | |
| | | KMV | | | | | | | | | | | | | |
| IC8 | Neo⁻WT⁺ | VN1R2- | 0 | 0 | 0 | 0 | | | | | 3-1*01 | CASSQDWG | | | 3796 |
| | | LML | | | | | | | | | | AEAFF | | | |
| IC9 | Neo⁻WT⁺ | 0 | 0 | 0 | 0 | 0 | 8-1*01 | CAVNALYNF | | | | | | | 3299 |
| | | | | | | | | NKFYF | | | | | | | |
| ID11 | Neo⁻WT⁺ | 0 | 0 | 0 | 0 | 0 | | | | | | | | | |
| ID2 | Neo⁻WT⁺ | ZDHHC7- | 0 | 0 | 0 | 0 | | | | | | | | | |
| | | SLL | | | | | | | | | | | | | |
| ID3 | Neo⁻WT⁺ | 0 | 0 | 0 | 0 | 0 | | | | | 7-9*01 | CASSLVLYD | | | 3797 |
| | | | | | | | | | | | | GGLQETQYF | | | |
| ID5 | Neo⁻WT⁺ | OR10A3- | 0 | 0 | 0 | 0 | | | | | 6-1*01 | CASSAFGIVA | | | 3798 |
| | | ILI | | | | | | | | | | DTQYF | | | |
| IE10 | Neo⁻WT⁺ | IPO9- | 0 | 0 | 0 | 0 | | | | | | | | | |
| | | FSS | | | | | | | | | | | | | |
| IE11 | Neo⁻WT⁺ | GPR174- | 0 | 0 | 0 | 0 | | | | | | | | | |
| | | FSF | | | | | | | | | | | | | |
| IE4 | Neo⁻WT⁺ | GLRA1- | 0 | 0 | 0 | 0 | 38-1*01 | CAYGTGANN | | | 15*01 | CATSGGQSN | | | 3300 |
| | | LIF | | | | | | LFF | | | | EKLFF | | | 3799 |
| IE6 | Neo⁻WT⁺ | 0 | 0 | 0 | 0 | 0 | | | | | | | | | |
| IE8 | Neo⁻WT⁺ | 0 | 0 | 0 | 0 | 0 | | | | | | | | | |
| IE9 | Neo⁻WT⁺ | OR5M3- | 0 | 0 | 0 | 0 | 8-6*01 | CAVSADKLIF | | | | | | | 3301 |
| | | KMV | | | | | | | | | | | | | |
| IF10 | Neo⁻WT⁺ | HERC1- | 0 | 0 | 0 | 0 | 14/ | CAMRAITQG | | | 28*01 | CASSLSYTP | | | 3302 |
| | | SLL | | | | | DV4*01 | GSERLVF | | | | HQPQHF | | | 3800 |
| IF12 | Neo⁻WT⁺ | OR5M3- | 0 | 0 | 0 | 0 | | | | | | | | | |
| | | KMV | | | | | | | | | | | | | |
| IF7 | Neo⁻WT⁺ | ITIH6- | 0 | 0 | 0 | 0 | | | | | | | | | |
| | | RLG | | | | | | | | | | | | | |
| IG1 | Neo⁻WT⁺ | GLRA1- | 0 | 0 | 0 | 0 | | | | | | | | | |
| | | LIF | | | | | | | | | | | | | |
| IG10 | Neo⁻WT⁺ | GLRA1- | 0 | 0 | 0 | 0 | 17*01 | CATDQGNTP | | | 13*01 | CASSPGGTN | | | 3303 |
| | | LIF | | | | | | LVF | | | | EKLFF | | | 3801 |
| IG12 | Neo⁻WT⁺ | 0 | 0 | 0 | 0 | 0 | 38-2/ | CAYIGYDMR | | | 6-6*01 | CASSYLMGQ | | | 3304 |
| | | | | | | | DV8*01 | F | | | | GKGQAFF | | | 3802 |
| IG3 | Neo⁻WT⁺ | OR5M3- | 0 | 0 | 0 | 0 | | | | | | | | | |
| | | KMV | | | | | | | | | | | | | |
| IG4 | Neo⁻WT⁺ | 0 | 0 | 0 | 0 | 0 | 17*01 | CAIADSWGK | | | | | | | 3305 |
| | | | | | | | | LQF | | | | | | | |
| IG5 | Neo⁻WT⁺ | OR5M3- | 0 | 0 | 0 | 0 | 19*01 | CALSEQTSY | | | 7-9*01 | CASSAGGTE | | | 3306 |
| | | KMV | | | | | | DKVIF | | | | AFF | | | 3803 |
| IH11 | Neo⁻WT⁺ | LCP1- | 0 | 0 | 0 | 0 | | | | | | | | | |
| | | NLF | | | | | | | | | | | | | |
| JA10 | Neo⁻WT⁺ | 0 | 0 | 0 | 0 | 0 | 41*01 | CAPTRNAGG | | | 4-1*01 | CASSPYGDQ | | | 3307 |
| | | | | | | | | TSYGKLTF | | | | LNTGELFF | | | 3804 |
| JA3 | Neo⁻WT⁺ | HTR1F-10 | 0 | 0 | 0 | 0 | 10*01 | CVVKGGYNK | | | 6-6*01 | CASNREVST | | | 3308 |
| | | | | | | | | LIF | | | | DTQYF | | | 3805 |
| JA8 | Neo⁻WT⁺ | 0 | 0 | 0 | 0 | 0 | 12-2*01 | CAVVHGGQ | | | | | | | 3309 |
| | | | | | | | | NFVF | | | | | | | |
| JB11 | Neo⁻WT⁺ | KAT6A- | 0 | 0 | 0 | 0 | 38-2/ | CAMEGNEKL | | | 12-3*01, | CASRGTGTG | | | 3310 |
| | | KLS | | | | | DV8*01 | TF | | | 12-4*01 | SYEQYF | | | 3806 |
| JB12 | Neo⁻WT⁺ | GLRA1- | 0 | 0 | 0 | 0 | 24*01 | CAPHSNYQL | | | | | | | 3311 |
| | | LIF | | | | | | IW | | | | | | | |
| JB4 | Neo⁻WT⁺ | OR8D4-10 | 0 | 0 | 0 | 0 | 8-3*01 | CAVAPGSGG | | | 29-1*01 | CSVPGTAYE | | | 3312 |
| | | | | | | | | SNYKLTF | | | | QYF | | | 3807 |
| JB7 | Neo⁻WT⁺ | OR5M3- | 0 | 0 | 0 | 0 | 14/ | CAMREVYNN | | | 10-3*01 | CAISDLDSN | | | 3313 |
| | | KMV | | | | | DV4*01 | AGNMLTF | | | | QPQHF | | | 3808 |
| JB8 | Neo⁻WT⁺ | ITIH6- | 0 | 0 | 0 | 0 | 19*01 | CALSGYSTL | | | 19*01 | CASSISGGS | | | 3314 |
| | | RLG | | | | | | TF | | | | YEQYF | | | 3809 |
| JB9 | Neo⁻WT⁺ | OR5M3- | 0 | 0 | 0 | 0 | 41*01 | CAAENRDDK | | | | | | | 3315 |
| | | KMV | | | | | | IIF | | | | | | | |
| JC1 | Neo⁻WT⁺ | OR5M3- | 0 | 0 | 0 | 0 | 19*01 | CALKGNNRL | 17*01 | CATEGSYI | 7-9*01 | CASSLSWED | | | 3316 |
| | | KMV | | | | | | AF | | PTF | | ENTDTQYF | | | 3478 |
| | | | | | | | | | | | | | | | 3810 |
| JC10 | Neo⁻WT⁺ | CNKSR1- | CNKSR1- | 0 | 0 | 0 | 3*01 | CDPIPTRRLS | | | | | | | 3317 |
| | | SLA | SLA_A9V | | | | | F | | | | | | | |
| JC3 | Neo⁻WT⁺ | 0 | 0 | 0 | 0 | 0 | 12-3*01 | CAMSVGNA | | | | | | | 3318 |
| | | | | | | | | GNMLTF | | | | | | | |
| JC4 | Neo⁻WT⁺ | 0 | 0 | 0 | 0 | 0 | 10*01 | CLVSGGYNK | | | 20-1*01 | CSARVPTSF | | | 3319 |
| | | | | | | | | LIF | | | | TDTQYF | | | 3811 |
| JC5 | Neo⁻WT⁺ | ITIH6- | 0 | 0 | 0 | 0 | 14/ | CAMRGYQK | | | 19*01 | CASSASEPS | | | 3320 |
| | | RLG | | | | | DV4*01 | VTF | | | | GETQYF | | | 3812 |
| JC6 | Neo⁻WT⁺ | OR5M3- | 0 | 0 | 0 | 0 | 19*01 | CALSEASEY | | | 7-9*01 | CASSFPVSD | | | 3321 |
| | | KMV | | | | | | GNKLVF | | | | PSTDTQYF | | | 3813 |
| JC9 | Neo⁻WT⁺ | 0 | 0 | 0 | 0 | 0 | 17*01 | CATEVQGAQ | | | 13*01 | CASSFGETQ | | | 3322 |
| | | | | | | | | KLVF | | | | YF | | | 3814 |
| JD1 | Neo⁻WT⁺ | CHD8- | 0 | 0 | 0 | 0 | 17*01 | CATDAEGAQ | | | 4-2*01 | CASSPTSGG | | | 3323 |
| | | KLN | | | | | | KLVF | | | | YEQYF | | | 3815 |
| JD2 | Neo⁻WT⁺ | PLXNB1- | 0 | 0 | 0 | 0 | | | | | | | | | |
| | | VLF | | | | | | | | | | | | | |
| JD5 | Neo⁻WT⁺ | 0 | 0 | 0 | 0 | 0 | 24*01 | CAFRFNKFY | | | 27*01 | CASGPNQPQ | | | 3324 |
| | | | | | | | | F | | | | HF | | | 3816 |
| JD6 | Neo⁻WT⁺ | 0 | 0 | 0 | 0 | 0 | 5*01 | CAVLDGYNK | | | | | | | 3325 |
| | | | | | | | | LIF | | | | | | | |
| JD7 | Neo⁻WT⁺ | 0 | 0 | 0 | 0 | 0 | 38-2/ | CAYRSAWD | | | 19*01 | CASSPWTGS | | | 3326 |
| | | | | | | | DV8*01 | MRF | | | | YQETQYF | | | 3817 |
| JE1 | Neo⁻WT⁺ | 0 | 0 | 0 | 0 | 0 | 38-2/ | CALSGGGAD | 38-2/ | CAYRSPFL | | | | | 3327 |
| | | | | | | | DV8*01 | GLTF | DV8*01 | RAGTASKL | | | | | 3479 |
| | | | | | | | | | | TF | | | | | |
| JE10 | Neo⁻WT⁺ | 0 | 0 | 0 | 0 | 0 | 10*01 | CVVSGGYNK | | | 2*01 | CARTGEDNS | | | 3328 |
| | | | | | | | | LIF | | | | PLHF | | | 3818 |
| JE5 | Neo⁻WT⁺ | OR5M3- | 0 | 0 | 0 | 0 | 12-2*01 | CAVNLYARL | | | 19*01 | CASSTGISYE | | | 3329 |
| | | KMV | | | | | | MF | | | | QYF | | | 3819 |
| JE6 | Neo⁻WT⁺ | 0 | 0 | 0 | 0 | 0 | 8-2*01 | CVDGGYQK | | | 6-1*01 | CASSEEVSD | | | 3330 |
| | | | | | | | | VTF | | | | DSPLHF | | | 3820 |
| JF10 | Neo⁻WT⁺ | PHKA2- | 0 | 0 | 0 | 0 | 12-2*01 | CAVKNDYKL | | | 5-6*01 | CASGRSGED | | | 3331 |
| | | LLS | | | | | | SF | | | | YGYTF | | | 3821 |
| JF2 | Neo⁻WT⁺ | OR5M3- | 0 | 0 | 0 | 0 | | | | | | | | | |
| | | KMV | | | | | | | | | | | | | |
| JF4 | Neo⁻WT⁺ | OR5M3- | 0 | 0 | 0 | 0 | 5*01 | CAEAISGGY | | | | | | | 3332 |
| | | KMV | | | | | | NKLIF | | | | | | | |
| JF8 | Neo⁻WT⁺ | CCM2- | 0 | 0 | 0 | 0 | | | | | | | | | |
| | | YML_R6H | | | | | | | | | | | | | |
| JG1 | Neo⁻WT⁺ | 0 | 0 | 0 | 0 | 0 | | | | | | | | | |
| JG10 | Neo⁻WT⁺ | 0 | 0 | 0 | 0 | 0 | | | | | | | | | |
| JG12 | Neo⁻WT⁺ | ZDHHC7- | 0 | 0 | 0 | 0 | 8-1*01 | CAVNKPNQA | | | 14*01 | CASSQNPGQ | | | 3333 |
| | | SLL | | | | | | GTALIF | | | | GIYSPLHF | | | 3822 |
| JG3 | Neo⁻WT⁺ | 0 | 0 | 0 | 0 | 0 | 12-2*01 | CAVKNTGFQ | | | | | | | 3334 |
| | | | | | | | | KLVF | | | | | | | |
| JG4 | Neo⁻WT⁺ | MLL2- | 0 | 0 | 0 | 0 | 1-2*01 | CAVSHLIAG | | | 9*01 | CASSGQGAY | | | 3335 |
| | | ALS | | | | | | GFKTIF | | | | ITDTQYF | | | 3823 |
| JG9 | Neo⁻WT⁺ | TTLL12- | 0 | 0 | 0 | 0 | 12-2*01 | CAVNEDKIIF | | | 12-3*01, | CASSLASGN | | | 3336 |
| | | KLP | | | | | | | | | 12-4*01 | EQFF | | | 3825 |
| JH10 | Neo⁻WT⁺ | 0 | 0 | 0 | 0 | 0 | 12-1*01 | CVVNGNNN | | | 19*01 | CASSKGGNQ | | | 3337 |
| | | | | | | | | DMRF | | | | PQHF | | | 3825 |
| JH12 | Neo⁻WT⁺ | 0 | 0 | 0 | 0 | 0 | 21*01 | CAVEGSNFG | | | | | | | 3338 |
| | | | | | | | | NEKLTF | | | | | | | |
| JH2 | Neo⁻WT⁺ | LCP1- | 0 | 0 | 0 | 0 | 12-2*01 | CAVSNNDM | | | 7-2*01 | CASSLAKMD | | | 3339 |
| | | NLF | | | | | | RF | | | | LPLAKNIQYF | | | 3826 |
| JH4 | Neo⁻WT⁺ | ZNF827- | 0 | 0 | 0 | 0 | | | | | | | | | |
| | | NLF | | | | | | | | | | | | | |
| JH5 | Neo⁻WT⁺ | APCDD1L- | 0 | 0 | 0 | 0 | | | | | | | | | |
| | | RLP | | | | | | | | | | | | | |
| JH8 | Neo⁻WT⁺ | 0 | 0 | 0 | 0 | 0 | | | | | | | | | |
| KA3 | Neo⁻WT⁺ | HAUS3- | 0 | 0 | 0 | 0 | 20*01 | CAVLLSNDY | 19*01 | CALSEGER | | | | | 3340 |
| | | ILN | | | | | | KLSF | | DDKIIF | | | | | 3480 |
| KA4 | Neo⁻WT⁺ | 0 | 0 | 0 | 0 | 0 | | | | | 4-2*01 | CASSQGDRD | | | 3827 |
| | | | | | | | | | | | | SGNTIYF | | | |
| KA5 | Neo⁻WT⁺ | LCP1- | 0 | 0 | 0 | 0 | 12-3*01 | CAMEDTNAG | | | 11-2*01 | CASSLGGDE | | | 3341 |
| | | NLF | | | | | | KSTF | | | | QYF | | | 3828 |
| KA7 | Neo⁻WT⁺ | OR5M3- | 0 | 0 | 0 | 0 | 9-2*01 | CALSDGEFY | | | | | | | 3342 |
| | | KMV | | | | | | NQGGKLIF | | | | | | | |
| KA8 | Neo⁻WT⁺ | OR5M3- | 0 | 0 | 0 | 0 | | | | | 7-9*01 | CASSMPTGT | | | 3829 |
| | | KMV | | | | | | | | | | DSYEQYF | | | |
| KA9 | Neo⁻WT⁺ | OR9Q2- | 0 | 0 | 0 | 0 | 12-1*01 | CVVILNARLM | | | 20-1*01 | CSAIVFSRG | | | 3343 |
| | | FLF | | | | | | F | | | | GDEQFF | | | 3830 |
| KB1 | Neo⁻WT⁺ | OR1G1- | 0 | 0 | 0 | 0 | 30*01 | CGTDNAGGT | | | 19*01 | CASSPGQGY | | | 3344 |
| | | FLF | | | | | | SYGKLTF | | | | EQYF | | | 3715 |
| KB10 | Neo⁻WT⁺ | CHD8- | 0 | 0 | 0 | 0 | 13-1*01 | CAASMGQA | | | 4-2*01 | CASSPAGTD | | | 3345 |
| | | KLN | | | | | | GTALIF | | | | YGYTF | | | 3831 |
| KB5 | Neo⁻WT⁺ | FNDC3B- | 0 | 0 | 0 | 0 | | | | | | | | | |
| | | VVL | | | | | | | | | | | | | |
| KB6 | Neo⁻WT⁺ | OR5M3- | 0 | 0 | 0 | 0 | | | | | 7-9*01 | CASSSINRD | | | 3832 |
| | | KMV | | | | | | | | | | KMNTEAFF | | | |
| KB8 | Neo⁻WT⁺ | GANAB- | 0 | 0 | 0 | 0 | 12-2*01 | CAVSGGGA | | | 5-6*01 | CASSPGTSY | | | 3346 |
| | | ALY | | | | | | DGLTF | | | | EQYF | | | 3833 |
| KC1 | Neo⁻WT⁺ | OR5M3- | 0 | 0 | 0 | 0 | 14/ | CAMREGRD | | | | | | | 3347 |
| | | KMV | | | | | DV4*01 | FGNEKLTF | | | | | | | |
| KC11 | Neo⁻WT⁺ | OR5M3- | 0 | 0 | 0 | 0 | 17*01 | CATDAGDDK | | | 7-9*01 | CASSLAVGQ | | | 3348 |
| | | KMV | | | | | | IIF | | | | PGEEEQYF | | | 3834 |
| KC2 | Neo⁻WT⁺ | OR9Q2- | 0 | 0 | 0 | 0 | 19*01 | CALSEWGS | | | | | | | 3349 |
| | | FLF | | | | | | QGNLIF | | | | | | | |
| KC5 | Neo⁻WT⁺ | DCHS1- | 0 | 0 | 0 | 0 | 14/ | CAMREGGD | 13-1*01 | CAAIIGQK | | | | | 3350 |
| | | TLF | | | | | DV4*01 | SSYKLIF | | LLF | | | | | 3481 |
| KC7 | Neo⁻WT⁺ | 0 | 0 | 0 | 0 | 0 | | | | | 12-3*01, | CASSKGAGV | | | 3835 |
| | | | | | | | | | | | 12-4*01 | FQETQYF | | | |
| KD11 | Neo⁻WT⁺ | OR5M3- | 0 | 0 | 0 | 0 | 19*01 | CALSEADDY | | | 20-1*01 | CSAHPRDVQ | | | 3351 |
| | | KMV | | | | | | KLSF | | | | ETQYF | | | 3836 |
| KD2 | Neo⁻WT⁺ | OR10A3- | 0 | 0 | 0 | 0 | | | | | | | | | |
| | | ILI | | | | | | | | | | | | | |
| KD6 | Neo⁻WT⁺ | 0 | 0 | 0 | 0 | 0 | | | | | 7-9*01 | CASSSTREQ | | | 3837 |
| | | | | | | | | | | | | LIGEKLFF | | | |
| KE4 | Neo⁻WT⁺ | OR5M3- | 0 | 0 | 0 | 0 | 8-1*01F | CAVKSGAGF | | | 7-9*01 | CASSLNRGL | | | 3352 |
| | | KMV | | | | | | GNVLHC | | | | NTGELFF | | | 3838 |
| KE5 | Neo⁻WT⁺ | 0 | 0 | 0 | 0 | 0 | 12-2*01 | CAVNWNYG | | | | | | | 3353 |
| | | | | | | | | GSQGNLIF | | | | | | | |
| KF10 | Neo⁻WT⁺ | 0 | 0 | 0 | 0 | 0 | | | | | 7-9*01 | CASSFSSLD | | | 3839 |
| | | | | | | | | | | | | NYGYTF | | | |
| KF7 | Neo⁻WT⁺ | SMOX- | 0 | 0 | 0 | 0 | 21*01 | CAVEPGDDY | | | 12-5*01 | CASDPDSLIH | | | 3354 |
| | | KLA | | | | | | KLSF | | | | NTGELFF | | | 3840 |
| KF8 | Neo⁻WT⁺ | OR5M3- | 0 | 0 | 0 | 0 | | | | | 7-9*01 | CASSSTGTG | | | 3841 |
| | | KMV | | | | | | | | | | GSYNSPLHF | | | |
| KF9 | Neo⁻WT⁺ | OR8D4-9 | OR8D4- | 0 | 0 | 0 | 23/ | CAVNQAGTA | | | 9*01 | CASSDNDW | | | 3355 |
| | | | 9_G3E | | | | DV6*01 | LIF | | | | RLQYF | | | 3842 |
| KG2 | Neo⁻WT⁺ | OR5M3- | 0 | 0 | 0 | 0 | | | | | 7-9*01 | CASSSPTSG | | | 3843 |
| | | KMV | | | | | | | | | | ADNEQFF | | | |
| KG3 | Neo⁻WT⁺ | 0 | 0 | 0 | 0 | 0 | 12-1*01 | CVVNLNYGG | | | 6-5*01 | CASSYSNGY | | | 3356 |
| | | | | | | | | SQGNLIF | | | | EQYF | | | 3844 |
| KG5 | Neo⁻WT⁺ | 0 | 0 | 0 | 0 | 0 | 5*01 | CAEGLEDTG | | | 19*01 | CASSPGGYG | | | 3357 |
| | | | | | | | | KLIF | | | | YTF | | | 3845 |
| KG8 | Neo⁻WT⁺ | 0 | 0 | 0 | 0 | 0 | | | | | | | | | |
| KH1 | Neo⁻WT⁺ | OR5M3- | 0 | 0 | 0 | 0 | 14/ | CAMREAHD | | | 7-9*01 | CASSFWGLP | | | 3358 |
| | | KMV | | | | | DV4*01 | NFGNEKLTF | | | | HQETQYF | | | 3846 |
| KH10 | Neo⁻WT⁺ | KAT6A- | 0 | 0 | 0 | 0 | 3*01 | CAVRDEDDK | | | 7-9*01 | CASSLASEQ | | | 3359 |
| | | KLS | | | | | | IIF | | | | YF | | | 3847 |
| KH12 | Neo⁻WT⁺ | OR5M3- | CLCN4- | 0 | 0 | 0 | 8-4*01 | CAVSARAFG | | | 7-9*01 | CASSADRTQ | | | 3360 |
| | | KMV | LLA | | | | | NEKLTF | | | | NYGYTF | | | 3848 |
| KH3 | Neo⁻WT⁺ | RYR3- | 0 | 0 | 0 | 0 | | | | | | | | | |
| | | VLN | | | | | | | | | | | | | |
| KH4 | Neo⁻WT⁺ | SEC24A- | 0 | 0 | 0 | 0 | 22*01 | CAVEDNFNK | | | | | | | 3361 |
| | | FLY | | | | | | FYF | | | | | | | |
| KH5 | Neo⁻WT⁺ | 0 | 0 | 0 | 0 | 0 | | | | | | | | | |
| KH8 | Neo⁻WT⁺ | 0 | 0 | 0 | 0 | 0 | 19*01 | CALSEAYSG | | | | | | | 3362 |
| | | | | | | | | SARQLTF | | | | | | | |
| LA10 | Neo⁻WT⁺ | 0 | 0 | 0 | 0 | 0 | 12-2*01 | CAVKSEYGN | | | 20-1*01 | CSAYPAGDG | | | 3363 |
| | | | | | | | | KLVF | | | | TGELFF | | | 3849 |
| LA11 | Neo⁻WT⁺ | OR5M3- | 0 | 0 | 0 | 0 | 19*01 | CALSEGNFG | | | 7-9*01 | CASSPPLWG | | | 3364 |
| | | KMV | | | | | | NEKLTF | | | | VYGYTF | | | 3850 |
| LA12 | Neo⁻WT⁺ | DCHS1- | 0 | 0 | 0 | 0 | 14/ | CAMRGGMD | | | | | | | 3365 |
| | | TLF | | | | | DV4*01 | SSYKLIF | | | | | | | |
| LA4 | Neo⁻WT⁺ | LCP1-NLF | 0 | 0 | 0 | 0 | 21*01 | CAVDGQAGT | 26-2*01 | CILRGIPR | 15*01 | CATSRVVTGN | | | 3366 |
| | | | | | | | | ALIF | | DSSYKLIF | | EQFF | | | 3482 |
| | | | | | | | | | | | | | | | 3851 |
| LA8 | Neo⁻WT⁺ | TBX3- | TBX3- | 0 | 0 | 0 | 14/ | CAMTSFQKL | | | 13*01 | CASSLRGEK | | | 3367 |
| | | GMG | GMG_T8M | | | | DV4*01 | VF | | | | NNYGYTF | | | 3852 |
| LA9 | Neo⁻WT⁺ | ITIH6- | 0 | 0 | 0 | 0 | 3*01 | CAVRDTRSY | | | 19*01 | CASSIQGNS | | | 3368 |
| | | RLG | | | | | | NTDKLIF | | | | NQPQHF | | | 3853 |
| LB1 | Neo⁻WT⁺ | OR5M3- | 0 | 0 | 0 | 0 | 26-1*01 | CIVRIIKAAG | 14/ | CAMREGRV | 7-9*01 | CASSLVRAD | | | 3370 |
| | | KMV | | | | | | NKLTF | DV4*01 | FGNEKLTF | | GETQYF | | | 3855 |
| LB11 | Neo⁻WT⁺ | ITIH6-RLG | 0 | 0 | 0 | 0 | 14/ | CAMRESNNA | | | 6-6*01 | CASSATGTV | | | 3371 |
| | | | | | | | DV4*01 | RLMF | | | | NTEAFF | | | 3856 |
| LB8 | Neo⁻WT⁺ | SEC24A- | 0 | 0 | 0 | 0 | 22*01 | CAVEMTTDS | | | 19*01 | CASSIGGYG | | | 3857 |
| | | FLY | | | | | | WGKLQF | | | | YTF | | | |
| LB9 | Neo⁻WT⁺ | 0 | 0 | 0 | 0 | 0 | | | | | 19*01 | CASTGTSYE | | | 3372 |
| | | | | | | | | | | | | QYF | | | 3858 |
| LC10 | Neo⁻WT⁺ | SEC24A- | 0 | 0 | 0 | 0 | 14/ | CAMRELYTG | | | 28*01 | CASSPSGTG | | | 3373 |
| | | FLY | | | | | DV4*01 | GFKTIF | | | | FYEQYF | | | 3859 |
| LC12 | Neo⁻WT⁺ | DOLPP1- | 0 | 0 | 0 | 0 | 8-2*01 | CGMDSSYKL | | | 20-1*01 | CSARVQGAY | | | |
| | | GLM | | | | | | IF | | | | EQYF | | | |
| LC2 | Neo⁻WT⁺ | LCP1- | 0 | 0 | 0 | 0 | 21 | CAVWVGFG | 19*01 | CALSRGG | 4-2*01 | CASSQVLGF | | | 3374 |
| | | NLF | | | | | | NVLHC | | GADGLTF | | SYEQYF | | | 3484 |
| | | | | | | | | | | | | | | | 3860 |
| LC7 | Neo⁻WT⁺ | ITIH6- | 0 | 0 | 0 | 0 | 29/ | CAGGDSWG | | | 4-1*01 | CASSRKGDS | | | 3375 |
| | | RLG | | | | | DV5*01 | KLQF | | | | PLHF | | | 3861 |
| LC8 | Neo⁻WT⁺ | SLC16A7- | 0 | 0 | 0 | 0 | | | | | 6-1*01 | CASSHDDRG | | | 3862 |
| | | AMA | | | | | | | | | | PNEKLFF | | | |
| LC9 | Neo⁻WT⁺ | KAT6A- | 0 | 0 | 0 | 0 | 12-2*01 | CAVSGDAGN | | | 9*01 | CASSTGGDT | | | 3376 |
| | | KLS | | | | | | MLTF | | | | QYF | | | 3863 |
| LD1 | Neo⁻WT⁺ | OR5M3- | 0 | 0 | 0 | 0 | 5*01 | CAESMGND | | | 6-2*01, | CASSYGHPG | | | 3377 |
| | | KMV | | | | | | MRF | | | 6-3*01 | EQYF | | | 3864 |
| LD3 | Neo⁻WT⁺ | ZDHHC7- | 0 | 0 | 0 | 0 | 12-2*01 | CAVNNARLM | | | 20-1*01 | CSALTGLGN | | | 3378 |
| | | SLL | | | | | | F | | | | YGYTF | | | 3865 |
| LD7 | Neo⁻WT⁺ | 0 | 0 | 0 | 0 | 0 | 1-1*01 | CAGRGYSTL | | | 27*01 | CASSSDSSY | | | 3379 |
| | | | | | | | | TF | | | | EQYF | | | 3866 |
| LD9 | Neo⁻WT⁺ | 0 | 0 | 0 | 0 | 0 | | | | | 9*01 | CASTPGGSS | | | 3867 |
| | | | | | | | | | | | | YNSPLHF | | | |
| LE11 | Neo⁻WT⁺ | SEC24A- | 0 | 0 | 0 | 0 | 12-2*01 | CAVTARSSY | | | | | | | 3380 |
| | | FLY | | | | | | KLIF | | | | | | | |
| LE5 | Neo⁻WT⁺ | BCL9L- | 0 | 0 | 0 | 0 | 12-2*01 | CAVGDSNYQ | | | 6-5*01 | CASSFNYNE | | | 3381 |
| | | FVY | | | | | | LIW | | | | OFF | | | 3868 |
| LF1 | Neo⁻WT⁺ | 0 | 0 | 0 | 0 | 0 | | | | | | | | | |
| LF10 | Neo⁻WT⁺ | TBX3- | 0 | 0 | 0 | 0 | 38-2/ | CAYRSFNNN | | | 13*01 | CASRSRGGH | | | 3382 |
| | | GMG | | | | | DV8*01 | DMRF | | | | SPLHF | | | 3869 |
| LF2 | Neo⁻WT⁺ | OR5M3- | 0 | 0 | 0 | 0 | | | | | | | | | |
| | | KMV | | | | | | | | | | | | | |
| LF3 | Neo⁻WT⁺ | 0 | 0 | 0 | 0 | 0 | | | | | | | | | |
| LF4 | Neo⁻WT⁺ | TBX3- | 0 | 0 | 0 | 0 | 17*01 | CATDNDMRF | | | 13*01 | CASSFGPDE | | | 3383 |
| | | GMG | | | | | | | | | | QYF | | | 3870 |
| LF5 | Neo⁻WT⁺ | 0 | 0 | 0 | 0 | 0 | 12-2*01 | CAPSLDMRF | | | | | | | 3384 |
| LF6 | Neo⁻WT⁺ | 0 | 0 | 0 | 0 | 0 | 4*01 | CLVGDGGVT | | | 28*01 | CASSSTGDN | | | 3385 |
| | | | | | | | | GGGNKLTF | | | | SPLHF | | | 3871 |
| LF8 | Neo⁻WT⁺ | 0 | 0 | 0 | 0 | 0 | 5*01 | CAESMERG | | | 28*01 | CASQSWRG | | | 3386 |
| | | | | | | | | DKLIF | | | | MNTEAFF | | | 3872 |
| LF9 | Neo⁻WT⁺ | OR5M3- | 0 | 0 | 0 | 0 | 1-1*01 | CAVVDSNYQ | | | 11-1*01 | CASSSPWG | | | 3387 |
| | | KMV | | | | | | LIW | | | | GTTDTSTDT | | | 3873 |
| | | | | | | | | | | | | QYF | | | |
| LG10 | Neo⁻WT⁺ | ITIH6- | 0 | 0 | 0 | 0 | 12-2*01 | CAVYGDYG | | | 11-2*01 | CASSRGGLT | | | 3388 |
| | | RLG | | | | | | GSQGNLIF | | | | DTQYF | | | 3874 |
| LG3 | Neo⁻WT⁺ | OR5M3- | 0 | 0 | 0 | 0 | | | | | | | | | |
| | | KMV | | | | | | | | | | | | | |
| LG5 | Neo⁻WT⁺ | GOLGA3- | 0 | 0 | 0 | 0 | | | | | | | | | |
| | | SLD | | | | | | | | | | | | | |
| LG6 | Neo⁻WT⁺ | KAT6A- | 0 | 0 | 0 | 0 | 19*01 | CALSEAEEY | | | 12-3*01, | CASSFLSSY | | | 3389 |
| | | KLS | | | | | | GNKLVF | | | 12-4*01 | NEQFF | | | 3875 |
| LG9 | Neo⁻WT⁺ | OR6F1- | 0 | 0 | 0 | 0 | | | | | | | | | |
| | | VLN | | | | | | | | | | | | | |
| LH11 | Neo⁻WT⁺ | 0 | 0 | 0 | 0 | 0 | | | | | | | | | |
| LH12 | Neo⁻WT⁺ | 0 | 0 | 0 | 0 | 0 | 12-2*01 | CAVKNTGRR | | | | | | | 3390 |
| | | | | | | | | ALTF | | | | | | | |
| MA11 | Neo⁻WT⁺ | 0 | 0 | 0 | 0 | 0 | 20*01 | CAVQAFGNE | | | 18*01 | CASSGPEAY | | | 3391 |
| | | | | | | | | KLTF | | | | EQYF | | | 3876 |
| MA12 | Neo⁻WT⁺ | SHROOM2- | 0 | 0 | 0 | 0 | 17*01 | CATGGVSNT | 25*01 | CAGYDYKL | 10-3*01 | CAISESKGN | | | 3392 |
| | | KLL | | | | | | NAGKSTF | | SF | | YGYTF | | | 3485 |
| | | | | | | | | | | | | | | | 3877 |
| MA6 | Neo⁻WT⁺ | OR5M3- | 0 | 0 | 0 | 0 | 9-2*01 | CALILTNFGN | | | 7-9*01 | CASSAPGQG | | | 3393 |
| | | KMV | | | | | | EKLTF | | | | NEKLFF | | | 3787 |
| MB11 | Neo⁻WT⁺ | 0 | 0 | 0 | 0 | 0 | | | | | | | | | |
| MB12 | Neo⁻WT⁺ | RYR3- | 0 | 0 | 0 | 0 | | | | | 19*01 | CASSIVDRPY | | | 3879 |
| | | VLN | | | | | | | | | | EQYF | | | |
| MB2 | Neo⁻WT⁺ | ITIH6- | 0 | 0 | 0 | 0 | 29/ | CAASVGDML | | | 15*01 | CATSRGTGA | | | 3394 |
| | | RLG | | | | | DV5*01 | TF | | | | GEQYF | | | 3880 |
| MB5 | Neo⁻WT⁺ | ITIH6- | 0 | 0 | 0 | 0 | 38-2/ | CAYTSNDMR | | | 7-4*01 | RASSPRTGG | 10-2*01 | CASSEFR | 3147 |
| | | RLG | | | | | DV8*01 | F | | | | EQYF | | NVGGYTF | 3881 |
| MB6 | Neo⁻WT⁺ | 0 | 0 | 0 | 0 | 0 | 3*01 | CAVRDNNFN | | | 6-6*01 | CASSYLDGA | | | 3395 |
| | | | | | | | | KFYF | | | | YEQYF | | | 3882 |
| MB7 | Neo⁻WT⁺ | MYPN- | MYPN- | 0 | 0 | 0 | 38-2/ | CAYMDSNY | | | 25-1*01 | CASSTGADL | | | 3396 |
| | | RVI_R1L | RVI | | | | DV8*01 | QLIW | | | | TYEQYF | | | 3883 |
| MC1 | Neo⁻WT⁺ | 0 | 0 | 0 | 0 | 0 | 38-2/ | CAYNQGGKL | | | 12-3*01, | CASSFTRDL | | | 3397 |
| | | | | | | | DV8*01 | IF | | | 12-4*01 | YGYTF | | | 3884 |
| MC11 | Neo⁻WT⁺ | OR5M3- | 0 | 0 | 0 | 0 | | | | | 7-9*01 | CASSLAVGE | 7-9*01 | CASLKMG | 3885 |
| | | KMV | | | | | | | | | | TRNSPLHF | | GLDEQFF | |
| MC2 | Neo⁻WT⁺ | 0 | 0 | 0 | 0 | 0 | | | | | 7-9*01 | CASSGTGGY | | | 3886 |
| | | | | | | | | | | | | EQYF | | | |
| MC3 | Neo⁻WT⁺ | OR5M3- | 0 | 0 | 0 | 0 | 4*01 | CLVGYSGGY | | | 7-9*01 | CASSLAGDR | | | 3398 |
| | | KMV | | | | | | QKVTF | | | | GRNSPLHF | | | 3887 |
| MC5 | Neo⁻WT⁺ | PIGN- | 0 | 0 | 0 | 0 | 12-2*01 | CAVVYSGGG | | | 19*01 | CASSPWTGA | | | 3399 |
| | | FLT | | | | | | ADGLTF | | | | EKLFF | | | 3888 |
| MC6 | Neo⁻WT⁺ | OR5M3- | 0 | 0 | 0 | 0 | | | | | 7-9*01 | CASSYFFEG | | | 3889 |
| | | KMV | | | | | | | | | | LNTGELFF | | | |
| MC9 | Neo⁻WT⁺ | LCP1- | 0 | 0 | 0 | 0 | | | | | 13*01 | CASSSPSGG | | | 3890 |
| | | NLF | | | | | | | | | | RTDTQYF | | | |
| MD10 | Neo⁻WT⁺ | OR5M3- | 0 | 0 | 0 | 0 | | | | | 7-9*01 | CASSFFASG | | | 3891 |
| | | KMV | | | | | | | | | | DTDTQYF | | | |
| MD2 | Neo⁻WT⁺ | VN1R2- | 0 | 0 | 0 | 0 | | | | | | | | | |
| | | LML | | | | | | | | | | | | | |
| MD6 | Neo⁻WT⁺ | 0 | 0 | 0 | 0 | 0 | 9-2*01 | CALTKETSG | | | 5-1*01 | CASSLEGTS | | | 3400 |
| | | | | | | | | SRLTF | | | | LNEQFF | | | 3892 |
| ME10 | Neo⁻WT⁺ | 0 | 0 | 0 | 0 | 0 | | | | | 2*01 | CASSPDSDH | | | 3893 |
| | | | | | | | | | | | | YGYTF | | | |
| ME5 | Neo⁻WT⁺ | 0 | 0 | 0 | 0 | 0 | | | | | 6-5*01 | CASSQFMNT | | | 3894 |
| | | | | | | | | | | | | EAFF | | | |
| ME6 | Neo⁻WT⁺ | 0 | 0 | 0 | 0 | 0 | 21*01 | CAVLNDYKL | 27*01 | CAGGTGY | 12-3*01, | CASSLQGNG | | | 3401 |
| | | | | | | | | SF | | NKLIF | 12-4*01 | YTF | | | 3486 |
| | | | | | | | | | | | | | | | 3895 |
| ME9 | Neo⁻WT⁺ | 0 | 0 | 0 | 0 | 0 | | | | | 5-5*01 | CASSLGGLS | | | 3896 |
| | | | | | | | | | | | | GYTF | | | |
| MF1 | Neo⁻WT⁺ | 0 | 0 | 0 | 0 | 0 | | | | | 27*01 | CASSFQGGT | | | 3897 |
| | | | | | | | | | | | | GYTF | | | |
| MF2 | Neo⁻WT⁺ | 0 | 0 | 0 | 0 | 0 | 4*01 | CLVGDPVDK | | | 6-1*01 | CASSEDGYE | | | 3402 |
| | | | | | | | | IIF | | | | QYF | | | 3898 |
| MF5 | Neo⁻WT⁺ | 0 | 0 | 0 | 0 | 0 | | | | | 6-2*01, | CASKNDGNS | | | 3899 |
| | | | | | | | | | | | 6-3*01 | PLHF | | | |
| MF6 | Neo⁻WT⁺ | SEC24A- | 0 | 0 | 0 | 0 | | | | | | | | | |
| | | FLY | | | | | | | | | | | | | |
| MG1 | Neo⁻WT⁺ | 0 | 0 | 0 | 0 | 0 | 17*01 | CATDEGGST | | | 13*01 | CASSLVTSG | | | 3403 |
| | | | | | | | | LGRLYF | | | | EQFF | | | 3900 |
| MG2 | Neo⁻WT⁺ | OR5M3- | 0 | 0 | 0 | 0 | | | | | | | | | |
| | | KMV | | | | | | | | | | | | | |
| MG4 | Neo⁻WT⁺ | OR5M3- | OR5M3- | 0 | 0 | 0 | 8-2*01 | CVVTISGGY | | | 11-2*01 | CASSLPDNN | | | 3404 |
| | | KMV | KMV_T8N | | | | | NKLIF | | | | EQFF | | | 3901 |
| MG7 | Neo⁻WT⁺ | 0 | 0 | 0 | 0 | 0 | 12-2*01 | CASGGGNM | | | 20-1*01 | CSATDVWGY | | | 3405 |
| | | | | | | | | LTF | | | | TF | | | 3902 |
| MG8 | Neo⁻WT⁺ | MRM1-9 | 0 | 0 | 0 | 0 | 12-2*01 | CAGNNARLM | | | 7-9*01 | CASSNLGGT | | | 3406 |
| | | | | | | | | F | | | | DTQYF | | | 3903 |
| MH11 | Neo⁻WT⁺ | KCNB2- | 0 | 0 | 0 | 0 | 19*01 | CALIYFSGGY | | | 7-6*01 | CASSSPSQG | | | 3407 |
| | | LLA | | | | | | NKLIF | | | | ITGELFF | | | 3904 |
| MH3 | Neo⁻WT⁺ | OR5M3- | 0 | 0 | 0 | 0 | 1-1*01 | CICEGGSYIP | | | 7-9*01 | CASSFWRD | | | 3408 |
| | | KMV | | | | | | TF | | | | GATNEKLFF | | | 3905 |
| MH5 | Neo⁻WT⁺ | HTR1F- | 0 | 0 | 0 | 0 | | | | | | | | | |
| | | 10 | | | | | | | | | | | | | |
| MH7 | Neo⁻WT⁺ | 0 | 0 | 0 | 0 | 0 | | | | | | | | | |
| NA10 | Neo⁻WT⁺ | HAUS3- | 0 | 0 | 0 | 0 | 21*01 | CAVITGGGN | | | | | | | 3409 |
| | | ILN | | | | | | KLTF | | | | | | | |
| NA4 | Neo⁻WT⁺ | SCN3A- | 0 | 0 | 0 | 0 | | | | | 27*01 | CASSFSARE | | | 3906 |
| | | ALV | | | | | | | | | | YGYTF | | | |
| NA5 | Neo⁻WT⁺ | 0 | 0 | 0 | 0 | 0 | 12-3*01 | CAMSGHDM | | | 27*01 | CASSFGANY | | | 3410 |
| | | | | | | | | RF | | | | GYTF | | | 3907 |
| NA7 | Neo⁻WT⁺ | LCP1- | 0 | 0 | 0 | 0 | 8-3*01 | CAVVRGDTD | | | 11-2*01 | CASSLYVYS | | | 3411 |
| | | NLF | | | | | | KLIF | | | | YEQYF | | | 3908 |
| NB2 | Neo⁻WT⁺ | LCP1- | 0 | 0 | 0 | 0 | 5*01 | CAEETGGGN | | | 11-2*01 | CASSLMGAE | | | 3412 |
| | | NLF | | | | | | KLTF | | | | AFF | | | 3909 |
| NC1 | Neo⁻WT⁺ | ATP6AP1- | KAT6A- | 0 | 0 | 0 | | | | | 4-1*01 | CASSQAGDG | | | 3910 |
| | | KLG | KLS | | | | | | | | | SYEQYF | | | |
| NC11 | Neo⁻WT⁺ | 0 | 0 | 0 | 0 | 0 | | | | | 3-1*01 | CASSQLDYN | | | 3911 |
| | | | | | | | | | | | | EQFF | | | |
| NC5 | Neo⁻WT⁺ | NOS1- | 0 | 0 | 0 | 0 | 38-1*01 | CAFIRGSQG | | | 11-2*01 | CASSFWSG | | | 3413 |
| | | FID | | | | | | NLIF | | | | GTYEQYF | | | 3912 |
| NC6 | Neo⁻WT⁺ | 0 | 0 | 0 | 0 | 0 | 26-2*01 | CILSYNTGN | 14/ | CAIIRFGN | 19*01 | CASSATSGA | | | 3414 |
| | | | | | | | | QFYF | DV4*01 | EKLTF | | YNEQFF | | | 3487 |
| | | | | | | | | | | | | | | | 3913 |
| NC9 | Neo⁻WT⁺ | 0 | 0 | 0 | 0 | 0 | | | | | 20-1*01 | CSARAVTNT | | | 3914 |
| | | | | | | | | | | | | GELFF | | | |
| ND1 | Neo⁻WT⁺ | 0 | 0 | 0 | 0 | 0 | | | | | | | | | |
| ND10 | Neo⁻WT⁺ | OR9Q2- | 0 | 0 | 0 | 0 | 12-2*01 | CAPRGSGR | | | 28*01 | CASSLQGGG | | | 3415 |
| | | FLF | | | | | | RALTF | | | | GYTF | | | 3915 |
| ND2 | Neo⁻WT⁺ | CD47- | APBB2- | 0 | 0 | 0 | | | | | | | | | |
| | | GLT | VQY_L7F | | | | | | | | | | | | |
| ND8 | Neo⁻WT⁺ | 0 | 0 | 0 | 0 | 0 | 35*01 | CAGPHLSYN | | | 14*01 | CASSQVGQ | | | 3416 |
| | | | | | | | | TDKLIF | | | | GQF | | | 3916 |
| ND9 | Neo⁻WT⁺ | ITIH6- | 0 | 0 | 0 | 0 | 8-3*01 | CAVGAGNN | | | 9*01 | CASSVYSTD | 4-3*01 | CASRVSA | 3417 |
| | | RLG | | | | | | DMRF | | | | TQYF | | SSYNEQF | 3917 |
| | | | | | | | | | | | | | | F | |
| NE10 | Neo⁻WT⁺ | 0 | 0 | 0 | 0 | 0 | | | | | 7-9*01 | CASSYLGRV | | | 3918 |
| | | | | | | | | | | | | NKNIQYF | | | |
| NE12 | Neo⁻WT⁺ | OR5M3- | 0 | 0 | 0 | 0 | 21*01 | CAVPSRPNF | 40*01 | CLLLNYGG | 7-9*01 | CASSLGGTE | | | 3418 |
| | | KMV | | | | | | GNEKLTF | | SQGNLIF | | AFF | | | 3488 |
| | | | | | | | | | | | | | | | 3919 |
| NE3 | Neo⁻WT⁺ | GABRG3- | 0 | 0 | 0 | 0 | | | | | 20-1*01 | CSARNRASY | | | 3920 |
| | | TAM | | | | | | | | | | NSPLHF | | | |
| NE7 | Neo⁻WT⁺ | 0 | 0 | 0 | 0 | 0 | 19*01 | CALPDIQGA | | | 18*01 | CASSQQGFY | | | 3419 |
| | | | | | | | | QKLVF | | | | EQYF | | | 3921 |
| NF1 | Neo⁻WT⁺ | 0 | 0 | 0 | 0 | 0 | 14/ | CAMREDYG | | | 15*01 | CATTPDRGH | | | 3420 |
| | | | | | | | DV4*01 | GSQGNLIF | | | | QPQHF | | | 3922 |
| NF10 | Neo⁻WT⁺ | OR5M3- | 0 | 0 | 0 | 0 | | | | | | | | | |
| | | KMV | | | | | | | | | | | | | |
| NF11 | Neo⁻WT⁺ | 0 | 0 | 0 | 0 | 0 | | | | | 6-5*01 | CASSYLEGD | | | 3923 |
| | | | | | | | | | | | | NYGYTF | | | |
| NF2 | Neo⁻WT⁺ | OR5M3- | 0 | 0 | 0 | 0 | | | | | | | | | |
| | | KMV | | | | | | | | | | | | | |
| NF5 | Neo⁻WT⁺ | OR5M3- | 0 | 0 | 0 | 0 | | | | | | | | | |
| | | KMV | | | | | | | | | | | | | |
| NG10 | Neo⁻WT⁺ | OR5M3- | 0 | 0 | 0 | 0 | 26-1*01 | CIVRVGYNA | | | 7-9*01 | CASSLGHFE | | | 3421 |
| | | KMV | | | | | | RLMF | | | | GNQPQHF | | | 3924 |
| NG12 | Neo⁻WT⁺ | 0 | 0 | 0 | 0 | 0 | | | | | | | | | |
| NG8 | Neo⁻WT⁺ | 0 | 0 | 0 | 0 | 0 | | | | | 29-1*01 | CSVTGNNYG | | | 3925 |
| | | | | | | | | | | | | YTF | | | |
| NH7 | Neo⁻WT⁺ | 0 | 0 | 0 | 0 | 0 | | | | | | | | | |
| NH8 | Neo⁻WT⁺ | ZDHHC7- | 0 | 0 | 0 | 0 | | | | | 7-9*01 | CASSSETNW | | | 3926 |
| | | SLL | | | | | | | | | | GTGGNQPQ | | | |
| | | | | | | | | | | | | HF | | | |
| OA10 | Neo⁻WT⁺ | NOS1- | 0 | 0 | 0 | 0 | 34*01 | CGAVFLNDY | | | 27*01 | CASSMTVMN | | | 3422 |
| | | FID | | | | | | KLSF | | | | TEAFF | | | 3927 |
| OA11 | Neo⁻WT⁺ | DHX33- | OR1G1- | 0 | 0 | 0 | 22*01 | CAVDIATFG | | | 9*01 | CASSVDFGR | | | 3423 |
| | | LLA_K5T | FLF | | | | | NEKLTF | | | | TYNEQFF | | | 3928 |
| OA12 | Neo⁻WT⁺ | OR5M3- | 0 | 0 | 0 | 0 | | | | | | | | | |
| | | KMV | | | | | | | | | | | | | |
| OA2 | Neo⁻WT⁺ | OR5M3- | DHX33- | 0 | 0 | 0 | 25*01F | STSFGSNYG | 8-6*01 | CAVSVGVK | 7-9*01 | CASSLVPSG | | | 3424 |
| | | KMV | LLA_K5T | | | | | QNFVF | | YNFNKFYF | | QANTEAFF | | | 3489 |
| | | | | | | | | | | | | | | | 3929 |
| OA3 | Neo⁻WT⁺ | 0 | 0 | 0 | 0 | 0 | 10*01 | CVVLGGYNK | | | | | | | 3425 |
| | | | | | | | | LIF | | | | | | | |
| OA4 | Neo⁻WT⁺ | 0 | 0 | 0 | 0 | 0 | | | | | | | | | |
| OA7 | Neo⁻WT⁺ | HCV- | 0 | 0 | 0 | 0 | | | | | 6-2*01, | CASSYRGVE | | | 3930 |
| | | KLV(APC) | | | | | | | | | 6-3*01 | QYF | | | |
| OA9 | Neo⁻WT⁺ | 0 | 0 | 0 | 0 | 0 | 19*01 | CALSEAGDY | | | 3-1*01 | CASSTEGRS | | | 3426 |
| | | | | | | | | KLSF | | | | SYEQYF | | | 3931 |
| OB1 | Neo⁻WT⁺ | 0 | 0 | 0 | 0 | 0 | 22*01 | CAVYDNFNK | | | | | | | 3427 |
| | | | | | | | | FYF | | | | | | | |
| OB3 | Neo⁻WT⁺ | 0 | 0 | 0 | 0 | 0 | | | | | | | | | |
| OB5 | Neo⁻WT⁺ | NSDHL- | NSDHL- | 0 | 0 | 0 | 19*01 | CALMMTTDS | | | | | | | 3428 |
| | | ILT_A9V | ILT | | | | | WGKLQF | | | | | | | |
| OB8 | Neo⁻WT⁺ | 0 | 0 | 0 | 0 | 0 | | | | | | | | | |
| OC1 | Neo⁻WT⁺ | OR5M3- | 0 | 0 | 0 | 0 | 38-2/ | CACTGGGA | | | 27*01 | CASSLSPTD | | | 3429 |
| | | KMV | | | | | DV8*01 | DGLTF | | | | TQYF | | | 3932 |
| OC11 | Neo⁻WT⁺ | KCNB2- | 0 | 0 | 0 | 0 | 19*01 | CALNTIRDSN | | | 20-1*01 | CSARVRGDH | | | 3430 |
| | | LLA | | | | | | YQLIW | | | | NEQFF | | | 3933 |
| OC5 | Neo⁻WT⁺ | 0 | 0 | 0 | 0 | 0 | | | | | 7-9*01 | CASSSYTDK | | | 3934 |
| | | | | | | | | | | | | KSPGELFF | | | |
| OC6 | Neo⁻WT⁺ | 0 | 0 | 0 | 0 | 0 | | | | | 7-9*01 | CASSPTDTQ | | | 3935 |
| | | | | | | | | | | | | YF | | | |
| OC7 | Neo⁻WT⁺ | OR5M3- | 0 | 0 | 0 | 0 | | | | | 7-9*01 | CASSLERGM | | | 3936 |
| | | KMV | | | | | | | | | | GSNQPQHF | | | |
| OC8 | Neo⁻WT⁺ | 0 | 0 | 0 | 0 | 0 | | | | | 7-9*01 | CASSDWTGS | | | 3937 |
| | | | | | | | | | | | | NEQFF | | | |
| OC9 | Neo⁻WT⁺ | 0 | 0 | 0 | 0 | 0 | | | | | | | | | |
| OD1 | Neo⁻WT⁺ | 0 | 0 | 0 | 0 | 0 | | | | | 6-5*01 | CASSNTGGR | | | 3938 |
| | | | | | | | | | | | | ETQYF | | | |
| OD12 | Neo⁻WT⁺ | 0 | 0 | 0 | 0 | 0 | | | | | | | | | |
| OD9 | Neo⁻WT⁺ | 0 | 0 | 0 | 0 | 0 | 8-4*01 | CAVSEYDKII | | | 12-3*01, | CASSSSGGG | | | 3431 |
| | | | | | | | | F | | | 12-4*01 | TEQFF | | | 3939 |
| OE12 | Neo⁻WT⁺ | 0 | 0 | 0 | 0 | 0 | | | | | 10-3*01 | CATWTGGG | | | 3940 |
| | | | | | | | | | | | | SEAFF | | | |
| OE4 | Neo⁻WT⁺ | 0 | 0 | 0 | 0 | 0 | 5*01 | CAEIISSASK | | | | | | | 3432 |
| | | | | | | | | IIF | | | | | | | |
| OE9 | Neo⁻WT⁺ | PELP1- | PELP1- | 0 | 0 | 0 | 19*01 | CARLTGANN | | | | | | | 3433 |
| | | LVL | LVL_L3F | | | | | LFF | | | | | | | |
| OF11 | Neo⁻WT⁺ | ITIH6- | 0 | 0 | 0 | 0 | | | | | | | | | |
| | | RLG | | | | | | | | | | | | | |
| OF12 | Neo⁻WT⁺ | 0 | 0 | 0 | 0 | 0 | | | | | | | | | |
| OF4 | Neo⁻WT⁺ | 0 | 0 | 0 | 0 | 0 | | | | | | | | | |
| OF5 | Neo⁻WT⁺ | OR5M3- | 0 | 0 | 0 | 0 | | | | | | | | | |
| | | KMV | | | | | | | | | | | | | |
| OG1 | Neo⁻WT⁺ | HTR1F- | 0 | 0 | 0 | 0 | | | | | | | | | |
| | | 10 | | | | | | | | | | | | | |
| OG10 | Neo⁻WT⁺ | 0 | 0 | 0 | 0 | 0 | 12-2*01 | CAVSPFSDG | | | | | | | 3434 |
| | | | | | | | | QKLLF | | | | | | | |
| OG11 | Neo⁻WT⁺ | OR5M3- | 0 | 0 | 0 | 0 | | | | | | | | | |
| | | KMV | | | | | | | | | | | | | |
| OG4 | Neo⁻WT⁺ | 0 | 0 | 0 | 0 | 0 | | | | | | | | | |
| OG6 | Neo⁻WT⁺ | OR5M3- | OR5M3- | 0 | 0 | 0 | 26-2*01 | CILRDMEYG | | | 7-9*01 | CASSRYGGP | | | 3435 |
| | | KMV | KMV_T8N | | | | | NKLVF | | | | SDNEQFF | | | 3941 |
| OG8 | Neo⁻WT⁺ | ITIH6- | 0 | 0 | 0 | 0 | 38-2/ | CAFNDYKLS | | | 10-3*01 | CAIRDRLNTE | | | 3436 |
| | | RLG | | | | | DV8*01 | F | | | | AFF | | | 3942 |
| OH1 | Neo⁻WT⁺ | 0 | 0 | 0 | 0 | 0 | | | | | | | | | |
| OH12 | Neo⁻WT⁺ | HTR1F- | 0 | 0 | 0 | 0 | 10*01 | CVVSGGYNK | | | 4-2*01 | CASSQGTSR | | | 3328 |
| | | 10 | | | | | | LIF | | | | DRNQPQHF | | | 3943 |
| OH5 | Neo⁻WT⁺ | 0 | 0 | 0 | 0 | 0 | 13-1*01 | CAASRLPGY | | | 7-9*01 | CASTLGGEG | | | 3437 |
| | | | | | | | | SSASKIIF | | | | RNTGELFF | | | 3944 |
| OH7 | Neo⁻WT⁺ | ST6GALNAC2- | 0 | 0 | 0 | 0 | 12-3*01 | CAMKDNDM | | | 5-4*01 | CARGSGGET | | | 3438 |
| | | LLF | | | | | | RF | | | | QYF | | | 3945 |
| SA12 | Neo⁻WT⁺ | 0 | 0 | 0 | 0 | 0 | | | | | | | | | |
| SA3 | Neo⁻WT⁺ | ERBB2- | 0 | 0 | 0 | 0 | 12-2*01 | CAVNSNSGY | | | 4-1*01 | CASSQSETG | | | 3439 |
| | | ALI | | | | | | ALNF | | | | DGYTF | | | 3946 |
| SB10 | Neo⁻WT⁺ | 0 | 0 | 0 | 0 | 0 | | | | | | | | | |
| SB11 | Neo⁻WT⁺ | 0 | 0 | 0 | 0 | 0 | | | | | | | | | |
| SB12 | Neo⁻WT⁺ | 0 | 0 | 0 | 0 | 0 | | | | | | | | | |
| SB3 | Neo⁻WT⁺ | KCNB2- | 0 | 0 | 0 | 0 | | | | | 19*01 | CASSITFSDT | | | 3947 |
| | | LLA | | | | | | | | | | QYF | | | |
| SB5 | Neo⁻WT⁺ | ZNF827- | 0 | 0 | 0 | 0 | 17*01 | CASSGGSYI | | | | | | | 3440 |
| | | NLF | | | | | | PTF | | | | | | | |
| SB6 | Neo⁻WT⁺ | 0 | 0 | 0 | 0 | 0 | 12-2*01 | CAVNDYKLS | | | 4-1*01 | CASSQALDQ | | | 3441 |
| | | | | | | | | F | | | | PQHF | | | 3948 |
| SB7 | Neo⁻WT⁺ | SCN3A- | 0 | 0 | 0 | 0 | 14/ | CAMREHGTA | | | | | | | 3442 |
| | | ALV | | | | | DV4*01 | GNKLTF | | | | | | | |
| SB9 | Neo⁻WT⁺ | 0 | 0 | 0 | 0 | 0 | | | | | | | | | |
| SC12 | Neo⁻WT⁺ | 0 | 0 | 0 | 0 | 0 | | | | | 19*01 | CASSNRDRG | | | 3949 |
| | | | | | | | | | | | | PYEQYF | | | |
| SC4 | Neo⁻WT⁺ | 0 | 0 | 0 | 0 | 0 | | | | | | | | | |
| SC5 | Neo⁻WT⁺ | ME1- | 0 | 0 | 0 | 0 | 14/ | CAMRERTG | | | 20-1*01 | CSARQTSGG | | | 3443 |
| | | FLD | | | | | DV4*01 | GFKTIF | | | | SSYNEQFF | | | 3950 |
| SC7 | Neo⁻WT⁺ | ITIH6- | 0 | 0 | 0 | 0 | | | | | | | | | |
| | | RLG | | | | | | | | | | | | | |
| SC8 | Neo⁻WT⁺ | 0 | 0 | 0 | 0 | 0 | | | | | | | | | |
| SD7 | Neo⁻WT⁺ | 0 | 0 | 0 | 0 | 0 | 12-2*01 | CAVMTTDS | | | 7-9*01 | CASSSLGLF | | | 3444 |
| | | | | | | | | WGKLQF | | | | AEQFF | | | 3951 |
| SD8 | Neo⁻WT⁺ | NSDHL- | NSDHL- | 0 | 0 | 0 | 14/ | CAMRETPQ | | | 2*01 | CASSEGQNT | | | 3445 |
| | | ILT | ILT_A9V | | | | DV4*01 | GGSEKLVF | | | | EAFF | | | 3952 |
| SE11 | Neo⁻WT⁺ | 0 | 0 | 0 | 0 | 0 | 24*01 | CAFINDYKLS | | | 6-2*01, | CASSTGPYN | | | 3446 |
| | | | | | | | | F | | | 6-3*01 | EQFF | | | 3953 |
| SE3 | Neo⁻WT⁺ | GPR174- | 0 | 0 | 0 | 0 | 20*01 | CAVSDTGGF | | | 7-8*01 | CASSLTGSS | | | 3447 |
| | | FSF | | | | | | KTIF | | | | DTQYF | | | 3954 |
| SE5 | Neo⁻WT⁺ | 0 | 0 | 0 | 0 | 0 | | | | | | | | | |
| SE6 | Neo⁻WT⁺ | OR5M3- | 0 | 0 | 0 | 0 | | | | | | | | | |
| | | KMV | | | | | | | | | | | | | |
| SE8 | Neo⁻WT⁺ | 0 | 0 | 0 | 0 | 0 | 12-1*01 | CVVNMEGG | | | 14*01 | CASSQAGQ | | | 3448 |
| | | | | | | | | GADGLTF | | | | GFRTEAFF | | | 3995 |
| SE9 | Neo⁻WT⁺ | 0 | 0 | 0 | 0 | 0 | | | | | | | | | |
| SF10 | Neo⁻WT⁺ | 0 | 0 | 0 | 0 | 0 | | | | | | | | | |
| SF3 | Neo⁻WT⁺ | HTR1F- | 0 | 0 | 0 | 0 | | | | | | | | | |
| | | 10 | | | | | | | | | | | | | |
| SF6 | Neo⁻WT⁺ | 0 | 0 | 0 | 0 | 0 | | | | | | | | | |
| SF8 | Neo⁻WT⁺ | OR5M3- | 0 | 0 | 0 | 0 | | | | | 7-9*01 | CASSLGQER | | | 3956 |
| | | KMV | | | | | | | | | | PYEQYF | | | |
| SG10 | Neo⁻WT⁺ | 0 | 0 | 0 | 0 | 0 | | | | | | | | | |
| SG11 | Neo⁻WT⁺ | 0 | 0 | 0 | 0 | 0 | | | | | | | | | |
| SG12 | Neo⁻WT⁺ | 0 | 0 | 0 | 0 | 0 | | | | | | | | | |
| SG3 | Neo⁻WT⁺ | 0 | 0 | 0 | 0 | 0 | | | | | | | | | |
| SG5 | Neo⁻WT⁺ | HTR1F- | 0 | 0 | 0 | 0 | | | | | | | | | |
| | | 10 | | | | | | | | | | | | | |
| SG6 | Neo⁻WT⁺ | GLRA1- | 0 | 0 | 0 | 0 | | | | | 5-1*01 | CASSFGQGY | | | 3957 |
| | | LIF | | | | | | | | | | EQYF | | | |
| SG9 | Neo⁻WT⁺ | 0 | 0 | 0 | 0 | 0 | | | | | | | | | |
| SH10 | Neo⁻WT⁺ | 0 | 0 | 0 | 0 | 0 | | | | | | | | | |
| SH11 | Neo⁻WT⁺ | 0 | 0 | 0 | 0 | 0 | | | | | | | | | |
| SH3 | Neo⁻WT⁺ | 0 | 0 | 0 | 0 | 0 | | | | | | | | | |
| SH5 | Neo⁻WT⁺ | ITIH6- | 0 | 0 | 0 | 0 | 19*01 | CALSEDQFY | | | 6-1*01 | CASRPGGGS | | | 3449 |
| | | RLG | | | | | | F | | | | YNEQFF | | | 3958 |
| SH7 | Neo⁻WT⁺ | ITIH6- | 0 | 0 | 0 | 0 | | | | | | | | | |
| | | RLG | | | | | | | | | | | | | |

TABLE 10
Experiment 1

| | | Tetramer | |
|---|---|---|---|
| Peptide Name | Sequence | Fluorescence | SEQ ID NO: |
| NYESO1-V165 | SLLMWITQV | PE | 3964 |
| ADI-SVA | SVASTITGV | PE | 3965 |
| BRA-AG | WLLPGTSTV | PE | 3966 |
| BRA-NA | WLLPGTSTL | PE | 3967 |
| CD1-LLG | LLGATCMFV | PE | 3968 |
| GP100-IMD | IMDQVPFSV | PE | 3969 |
| GP100-AML | AMLGTHTMEV | PE | 3970 |
| GP100-ITD | ITDQVPFSV | PE | 3971 |
| GP100-KTW | KTWGQYWQV | PE | 3972 |
| GP100-YLE | YLEPGPVTA | PE | 3973 |
| GPC-FVG | FVGEFFTDV | PE | 3974 |
| HAFP-FMN | FMNKFIYEI | PE | 3975 |
| HAFP-GLS | GLSPNLNRFL | PE | 3976 |
| MAGEA10-GLY | GLYDGMEHL | PE | 3977 |
| MAGEC2-LLF | LLFGLALIEV | PE | 3978 |
| MART1-A2L | ELAGIGILTV | PE | 3979 |
| MART1-ALM | ALMDKSLHV | PE | 3980 |
| MG50-CMH | CMHLLLEAV | PE | 3981 |
| NYESO1-9A | SLLMWITQA | PE | 3982 |
| TYR-YMD | YMDGTMSQV | PE | 3983 |
| TYR-CLL | CLLWSFQTSA | PE | 3984 |
| WT1-RMF | RMFPNAPYL | PE | 3985 |
| AGL-GLI | QLIPCMDVV | PE | 3986 |
| EF2-ILT | ILTDITKGV | PE | 3987 |
| FBA-ALS | ALSDHHIYL | PE | 3988 |
| HA-VLH | VLHDDLLEA | PE | 3989 |
| KER-ALL | ALLNIKVKL | PE | 3990 |
| L19-ILM | ILMEHIHKL | PE | 3991 |
| PD5-KLS | KLSEGDLLA | PE | 3992 |
| PP1-SII | SIIGRLLEV | PE | 3993 |
| DDX5-YLL | YLLPAIVHI | PE | 3994 |
| SMCY-FID | FIDSYICQV | PE | 3995 |
| SNPG-IML | IMLEALERV | PE | 3996 |
| GAD-RMM | RMMEYGTTMV | PE | 3997 |
| GAD65-VMN | VMNILLQYVV | PE | 3998 |
| GFAP-NLA | NLAQTDLATV | PE | 3999 |
| HCHGA-LLC | LLCAGQVTAL | PE | 4000 |
| HCHGA-TLS | TLSKPSPMPV | PE | 4001 |
| IA2-MVW | MVWESGCTV | PE | 4002 |
| IA2-VIV | VIVMLTPLV | PE | 4003 |
| IA2-SLY | SLYHVYEVNL | PE | 4004 |
| IA2-SLS | SLSPLQAEL | PE | 4005 |
| IA2-SLA | SLAAGVKLL | PE | 4006 |
| IAPP-KLQ | KLQVFLIVL | PE | 4007 |
| IAPP-FLI | FLIVLSVAL | PE | 4008 |
| IGRP-VLF | VLFGLGFAI | PE | 4009 |
| IGRP-RLL | RLLCALTSL | PE | 4010 |
| IGRP-FLW | FLWSVFMLI | PE | 4011 |
| IGRP-FLF | FLFAVGFYL | PE | 4012 |
| INS-HLV | HLVEALYLV | PE | 4013 |
| INS-SHL | SHLVEALYLV | PE | 4014 |
| DRIP-MLY | MLYQHLLPL | PE | 4015 |
| PPI-15-23 | ALWGPDPAA | PE | 4016 |
| PPI-15-24 | ALWGPDPAAA | PE | 4017 |
| PPI-RLL | RLLPLLALL | PE | 4018 |
| PPI-ALVVM | ALWMRLLPL | PE | 4019 |
| ZNT8-VAA | VAANIVLTV | PE | 4020 |
| ZNT8-LLI | LLIDLTSFLL | PE | 4021 |
| ZNT8-LLS | LLSLFSLWL | PE | 4022 |
| ZNT8-WT | VVTGVLVYL | PE | 4023 |
| ZNT8-VMI | VMIIVSSLAV | PE | 4024 |
| ZNT8-ILA | ILAVDGVLSV | PE | 4025 |
| HCV-K1S | SLVALGINAV | APC | 4026 |
| HCV-K1Y | YLVALGINAV | APC | 4027 |
| HCV-K1Y17V | YLVALGVNAV | APC | 4028 |
| HCV-L2I | KIVALGINAV | APC | 4029 |
| HCV-KLV (WT) | KLVALGINAV | APC | 4030 |
| CMV-VLE | VLEETSVML | APC | 4031 |
| CMV-MLN | MLNIPSINV | APC | 4032 |
| CMV-NLV | NLVPMVATV | APC | 4033 |
| EBV-GLC | GLCTLVAML | APC | 4034 |
| EBV-YVL | YVLDHLIVV | APC | 4035 |
| EBV-YLQ | YLQQNWWTL | APC | 4036 |
| EBV-CLG | CLGGLLTMV | APC | 4037 |
| EBV-FLY | FLYALALLL | APC | 4038 |
| HCV-FLP | FLPSDFFPSV | APC | 4039 |
| HBV-WLS | WLSLLVPFV | APC | 4040 |
| HCV-YLL | YLLPRRGPRL | APC | 4041 |
| HCV-CIN | CINGVCWTV | APC | 4042 |
| HCV-LLF | LLFNILGGWV | APC | 4043 |
| HIV-ILK | ILKEPVHGV | APC | 4044 |
| HIV-SLY | SLYNTVATL | APC | 4045 |
| HPV-YML | YMLDLQPETT | APC | 4046 |
| HSV-SLP | SLPITVYYA | APC | 4047 |
| HTLV-GLL | GLLSLEEEL | APC | 4048 |
| HTLV-LLF | LLFGYPVYV | APC | 4049 |
| IV-AIM | AIMDKNIIL | APC | 4050 |
| IV-GIL | GILGFVFTL | APC | 4051 |
| IVPA-FMY | FMYSDFHFI | APC | 4052 |
| MEA-SMY | SMYRVFEVGV | APC | 4053 |
| MEA-ILP | ILPGQDLQYV | APC | 4054 |
| YFV-LLW | LLWNGPMAV | APC | 4055 |
| ALADH-VLM | VLMGGVPGVE | APC | 4056 |
| GLNS-GLL | GLLHHAPSL | APC | 4057 |
| SODA-DMW | DMWEHAFYL | APC | 4058 |
| Empty | EMPTY | APC | 4059 |

Experiment 2

| | | Tetramer | |
|---|---|---|---|
| Peptide Name | Sequence | Fluorescence | SEQ ID NO: |
| NYESO1-V165 | SLLMWITQV | PE | 4060 |
| ADI-SVA | SVASTITGV | PE | 4061 |
| BRA-AG | WLLPGTSTV | PE | 4062 |
| BRA-NA | WLLPGTSTL | PE | 4063 |
| CD1-LLG | LLGATCMFV | PE | 4064 |
| GP100-IMD | IMDQVPFSV | PE | 4065 |
| GP100-AML | AMLGTHTMEV | PE | 4066 |
| GP100-ITD | ITDQVPFSV | PE | 4067 |
| GP100-KTW | KTWGQYWQV | PE | 4068 |
| GP100-YLE | YLEPGPVTA | PE | 4069 |
| GPC-FVG | FVGEFFTDV | PE | 4070 |
| HAFP-FMN | FMNKFIYEI | PE | 4071 |
| HAFP-GLS | GLSPNLNRFL | PE | 4072 |
| MAGEA10-GLY | GLYDGMEHL | PE | 4073 |
| MAGEC2-LLF | LLFGLALIEV | PE | 4074 |
| MART1-A2L | ELAGIGILTV | PE | 4075 |
| MART1-ALM | ALMDKSLHV | PE | 4076 |
| MG50-CMH | CMHLLLEAV | PE | 4077 |
| NYESO1-9A | SLLMWITQA | PE | 4078 |
| TYR-YMD | YMDGTMSQV | PE | 4079 |
| TYR-CLL | CLLWSFQTSA | PE | 4080 |
| WT1-RMF | RMFPNAPYL | PE | 4081 |
| AGL-GLI | QLIPCMDVV | PE | 4082 |
| EF2-ILT | ILTDITKGV | PE | 4083 |
| FBA-ALS | ALSDHHIYL | PE | 4084 |
| HA-VLH | VLHDDLLEA | PE | 4085 |
| KER-ALL | ALLNIKVKL | PE | 4086 |
| L19-ILM | ILMEHIHKL | PE | 4087 |
| PD5-KLS | KLSEGDLLA | PE | 4088 |
| PP1-SII | SIIGRLLEV | PE | 4089 |
| DDX5-YLL | YLLPAIVHI | PE | 4090 |
| SMCY-FID | FIDSYICQV | PE | 4091 |
| SNPG-IML | IMLEALERV | PE | 4092 |
| GAD-RMM | RMMEYGTTMV | PE | 4093 |
| GAD65-VMN | VMNILLQYVV | PE | 4094 |
| GFAP-NLA | NLAQTDLATV | PE | 4095 |
| HCHGA-LLC | LLCAGQVTAL | PE | 4096 |
| HCHGA-TLS | TLSKPSPMPV | PE | 4097 |
| IA2-MVW | MVWESGCTV | PE | 4098 |
| IA2-VIV | VIVMLTPLV | PE | 4099 |
| IA2-SLY | SLYHVYEVNL | PE | 4100 |
| IA2-SLS | SLSPLQAEL | PE | 4101 |
| IA2-SLA | SLAAGVKLL | PE | 4102 |
| IAPP-KLQ | KLQVFLIVL | PE | 4103 |
| IAPP-FLI | FLIVLSVAL | PE | 4104 |
| IGRP-VLF | VLFGLGFAI | PE | 4105 |
| IGRP-RLL | RLLCALTSL | PE | 4106 |
| IGRP-FLW | FLWSVFMLI | PE | 4107 |
| IGRP-FLF | FLFAVGFYL | PE | 4108 |
| INS-HLV | HLVEALYLV | PE | 4109 |
| INS-SHL | SHLVEALYLV | PE | 4110 |
| DRIP-MLY | MLYQHLLPL | PE | 4111 |
| PPI-15-23 | ALWGPDPAA | PE | 4112 |
| PPI-15-24 | ALWGPDPAAA | PE | 4113 |
| PPI-RLL | RLLPLLALL | PE | 4114 |
| PPI-ALVVM | ALVVMRLLPL | PE | 4115 |
| ZNT8-VAA | VAANIVLTV | PE | 4116 |
| ZNT8-LLI | LLIDLTSFLL | PE | 4117 |
| ZNT8-LLS | LLSLFSLWL | PE | 4118 |
| ZNT8-VVT | VVTGVLVYL | PE | 4119 |
| ZNT8-VMI | VMIIVSSLAV | PE | 4120 |
| ZNT8-ILA | ILAVDGVLSV | PE | 4121 |
| HCV-K1S | SLVALGINAV | APC | 4122 |
| HCV-K1Y | YLVALGINAV | APC | 4123 |
| HCV-K1Y17V | YLVALGVNAV | APC | 4124 |
| HCV-L21 | KIVALGINAV | APC | 4125 |
| HCV-KLV (WT) | KLVALGINAV | APC | 4126 |
| CMV-VLE | VLEETSVML | APC | 4127 |
| CMV-MLN | MLNIPSINV | APC | 4128 |
| CMV-NLV | NLVPMVATV | APC | 4129 |
| EBV-GLC | GLCTLVAML | APC | 4130 |
| EBV-YVL | YVLDHLIVV | APC | 4131 |
| EBV-YLQ | YLQQNWWTL | APC | 4132 |
| EBV-CLG | CLGGLLTMV | APC | 4133 |
| EBV-FLY | FLYALALLL | APC | 4134 |
| HCV-FLP | FLPSDFFPSV | APC | 4135 |
| HBV-WLS | WLSLLVPFV | APC | 4136 |
| HCV-YLL | YLLPRRGPRL | APC | 4137 |
| HCV-CIN | CINGVCVVTV | APC | 4138 |
| HCV-LLF | LLFNILGGWV | APC | 4139 |
| HIV-ILK | ILKEPVHGV | APC | 4140 |
| HIV-SLY | SLYNTVATL | APC | 4141 |
| HPV-YML | YMLDLQPETT | APC | 4142 |
| HSV-SLP | SLPITVYYA | APC | 4143 |
| HTLV-GLL | GLLSLEEEL | APC | 4144 |
| HTLV-LLF | LLFGYPVYV | APC | 4145 |
| IV-AIM | AIMDKNIIL | APC | 4146 |
| IV-GIL | GILGFVFTL | APC | 4147 |
| IVPA-FMY | FMYSDFHFI | APC | 4148 |
| MEA-SMY | SMYRVFEVGV | APC | 4149 |
| MEA-ILP | ILPGQDLQYV | APC | 4150 |
| YFV-LLW | LLWNGPMAV | APC | 4151 |
| ALADH-VLM | VLMGGVPGVE | APC | 4152 |
| GLNS-GLL | GLLHHAPSL | APC | 4153 |
| SODA-DMW | DMWEHAFYL | APC | 4154 |
| HCV-A9N | KLVALGINNV | APC | 4155 |

Experiment 3

| | | Tetramer | |
|---|---|---|---|
| Peptide Name | Sequence | Fluorescence | SEQ ID NO |
| WDR46 | FLTYLDVSV | PE | 4156 |
| AHNAK | SMPDFDLHL | PE | 4157 |
| COL18A1 | VLLGVKLSGV | PE | 4158 |
| ERBB2 | ALIHHNTHL | PE | 4159 |
| TEAD1 (VLE) | VLENFTILLV | PE | 4160 |
| TEAD1 (SVL) | SVLENFTILL | PE | 4161 |
| NSDHL | ILTGLNYEA | PE | 4162 |
| GANAB | ALYGSVPVL | PE | 4163 |
| FNDC3B | VVLSWAPPV | PE | 4164 |
| GCN1L1 | ALLETLSLLL | PE | 4165 |
| MLL2 | ALSPVIPLI | PE | 4166 |
| SMARCD3 | KLFEFLVHGV | PE | 4167 |
| GNL3L | NLNRCSVPV | PE | 4168 |
| USP28 | LIIPCIHLI | PE | 4169 |
| MRM1 | LLFGMTPCL | PE | 4170 |
| SNX24 | KLSHQPVLL | PE | 4171 |
| PGM5 | AVGSHVYSV | PE | 4172 |
| SEC24A | FLYNPLTRV | PE | 4173 |
| AKAP13 | KLMNIQQQL | PE | 4174 |
| PABPC1 | MLGERLFPL | PE | 4175 |
| WDR46 T3I | FLIYLDVSV | APC | 4176 |
| AHNAK S1F | FMPDFDLHL | APC | 4177 |
| COL18A1 S8F | VLLGVKLFGV | APC | 4178 |
| ERBB2 H8Y | ALIHHNTYL | APC | 4179 |
| TEAD1 L8F | VLENFTIFLV | APC | 4180 |
| TEAD1 L9F | SVLENFTIFL | APC | 4181 |
| NSDHL A9V | ILTGLNYEV | APC | 4182 |
| GANAB S5F | ALYGFVPVL | APC | 4183 |
| FNDC3B L3M | VVMSWAPPV | APC | 4184 |
| GCN1L1 L6P | ALLETPSLLL | APC | 4185 |
| MLL2 L8H | ALSPVIPHI | APC | 4186 |
| SMARCD3 H8Y | KLFEFLVYGV | APC | 4187 |
| GNL3L R4C | NLNCCSVPV | APC | 4188 |
| USP28 C5F | LIIPFIHLI | APC | 4189 |
| MRM1 T6P | LLFGMPPCL | APC | 4190 |
| SNX24 P6L | KLSHQLVLL | APC | 4191 |
| PGM5 H5Y | AVGSYVYSV | APC | 4192 |
| SEC24A P5L | FLYNLLTRV | APC | 4193 |
| AKAP13 Q8K | KLMNIQQKL | APC | 4194 |
| PABPC1 R5Q | MLGEQLFPL | APC | 4195 |
| HCV-KLV (WT) | KLVALGINAV | PE | 4196 |
| HCV-KLV (WT) | KLVALGINAV | APC | 4197 |
| EMPTY | | APC | 4198 |
| EMPTY | | PE | 4199 |

Experiment 4

| | | Tetramer | |
|---|---|---|---|
| Peptide Name | Sequence | Fluorescence | SEQ ID NO |
| WDR46 | FLTYLDVSV | PE | 4200 |
| AHNAK | SMPDFDLHL | PE | 4201 |
| COL18A1 | VLLGVKLSGV | PE | 4202 |
| ERBB2 | ALIHHNTHL | PE | 4203 |
| TEAD1 (VLE) | VLENFTILLV | PE | 4204 |
| TEAD1 (SVL) | SVLENFTILL | PE | 4205 |
| NSDHL | ILTGLNYEA | PE | 4206 |
| GANAB | ALYGSVPVL | PE | 4207 |
| FNDC3B | VVLSWAPPV | PE | 4208 |
| GCN1L1 | ALLETLSLLL | PE | 4209 |
| MLL2 | ALSPVIPLI | PE | 4210 |
| SMARCD3 | KLFEFLVHGV | PE | 4211 |
| GNL3L | NLNRCSVPV | PE | 4212 |
| USP28 | LIIPCIHLI | PE | 4213 |
| MRM1 | LLFGMTPCL | PE | 4214 |
| SNX24 | KLSHQPVLL | PE | 4215 |
| PGM5 | AVGSHVYSV | PE | 4216 |
| SEC24A | FLYNPLTRV | PE | 4217 |
| AKAP13 | KLMNIQQQL | PE | 4218 |
| PABPC1 | MLGERLFPL | PE | 4219 |
| WDR46 T3I | FLIYLDVSV | APC | 4220 |
| AHNAK S1F | FMPDFDLHL | APC | 4221 |
| COL18A1 S8F | VLLGVKLFGV | APC | 4222 |
| ERBB2 H8Y | ALIHHNTYL | APC | 4223 |
| TEAD1 L8F | VLENFTIFLV | APC | 4224 |
| TEAD1 L9F | SVLENFTIFL | APC | 4225 |
| NSDHL A9V | ILTGLNYEV | APC | 4226 |
| GANAB S5F | ALYGFVPVL | APC | 4227 |
| FNDC3B L3M | VVMSWAPPV | APC | 4228 |
| GCN1L1 L6P | ALLETPSLLL | APC | 4229 |
| MLL2 L8H | ALSPVIPHI | APC | 4230 |
| SMARCD3 H8Y | KLFEFLVYGV | APC | 4231 |
| GNL3L R4C | NLNCCSVPV | APC | 4232 |
| USP28 C5F | LIIPFIHLI | APC | 4233 |
| MRM1 T6P | LLFGMPPCL | APC | 4234 |
| SNX24 P6L | KLSHQLVLL | APC | 4235 |
| PGM5 H5Y | AVGSYVYSV | APC | 4236 |
| SEC24A P5L | FLYNLLTRV | APC | 4237 |
| AKAP13 Q8K | KLMNIQQKL | APC | 4238 |
| PABPC1 R5Q | MLGEQLFPL | APC | 4239 |
| MAGE-A3 112-120 | KVAELVHFL | PE | 4240 |
| MAGE-A12 112-120 | KMAELVHFL | APC | 4241 |
| MAGE-A2 112-120 | KMVELVHFL | APC | 4242 |
| MAGE-A6 112-120 | KVAKLVHFL | APC | 4243 |

Experiment 5

| | | Tetramer | |
|---|---|---|---|
| Peptide Name | Sequence | Fluorescence | SEQ ID |
| A2ML1-YLD_K7R | YLDELIRNT | PE | 4244 |
| AGFG2-FLQ_S4S | FLQFRGNEV | PE | 4245 |
| AGXT2 L2-ILT_M5I | ILTDIEEKV | PE | 4246 |
| AHNAK-SMP_S1F | FMPDFDLHL | PE | 4247 |
| AKAP13-KLM_Q8K | KLMNIQQKL | PE | 4248 |
| APBB2-GML_L3F | GMFPVDKPV | PE | 4249 |
| APBB2-VQY_L7F | VQYLGMFPV | PE | 4250 |
| APCDD1L-RLP_R1W | WLPHVEYEL | PE | 4251 |
| ATP6AP1-KLG_G3W | KLWASPLHV | PE | 4252 |
| BAIAP3-ILN_V61 | ILNVDIFTL | PE | 4253 |
| BCL9L-FVY_T6I | FVYVFITHL | PE | 4254 |
| BTBD1-FML_LI | FMLLTQARI | PE | 4255 |
| C15orf32-MLS_G9R | MLSILALVRV | PE | 4256 |
| C17orf75-ALS_V7A | ALSYTPAEV | PE | 4257 |
| C1S-10_N1H | HLMDGDLGLI | PE | 4258 |
| C1S-9_N1H | HLMDGDLGL | PE | 4259 |
| C3orf58-LMV_L4P | LMVPHSPSL | PE | 4260 |
| CAMK1D-KLF_K8N | KLFEQILNA | PE | 4261 |
| CCM2-YML_R6H | YMLTLHTKL | PE | 4262 |
| CD47-GLT_V6F | GLTSFFIAI | PE | 4263 |
| CDC37L1-FLS_P6L | FLSDHLYLV | PE | 4264 |
| CELSR1-YLF_F3L | YLLAIFSGL | PE | 4265 |
| CHD8-KLN_P7A | KLNTITAVV | PE | 4266 |
| CHST13-VLV_V1M | MLVDDAHGL | PE | 4267 |
| CHST14-MLM_F4L | MLMLAVIVA | PE | 4268 |
| CLCN4-LLA_G8V | LLAGTLAVV | PE | 4269 |
| CNKSR1-SLA_A9V | SLAPLSPRV | PE | 4270 |
| COL18A1-VLL_S8F | VLLGVKLFGV | PE | 4271 |
| DCHS1-TLF_I5M | TLFTMVGTV | PE | 4272 |
| DHX33-LLA_K5T | LLAMTVPNV | PE | 4273 |
| DHX33-LLA_M4I | LLAIKVPNV | PE | 4274 |
| DNAH8-FMT_G7D | FMTKINDLEV | PE | 4275 |
| DOCK7-FLN_M9L | FLNDLLSVL | PE | 4276 |
| DOLPP1-GLM_A4V | GLMVIAWFI | PE | 4277 |
| DRAM1-FII_I3F | FIFSYVVAV | PE | 4278 |
| ERBB2-ALI_H8Y | ALIHHNTYL | PE | 4279 |
| EXOC3L4-ILL_V9I | ILLDWAANI | PE | 4280 |
| FAM47B-ALF_A1S | SLFSELSPV | PE | 4281 |
| FBXL4-SLL_L2V | SVLEYYTEL | PE | 4282 |
| FLNA-HIA_P6L | HIAKSLFEV | PE | 4283 |
| FNDC3B-VVL_L3M | VVMSWAPPV | PE | 4284 |
| GABRG3-TAM_L5I | TAMDIFVTV | PE | 4285 |
| GABRG3-YVT_L7I | YVTAMDIFV | PE | 4286 |
| GALC-YVV_V3L | YVLTWIVGA | PE | 4287 |
| GANAB-ALY_S5F | ALYGFVPVL | PE | 4288 |
| GCN1L1-10_L6P | ALLETPSLLL | PE | 4289 |
| GCN1L1-9_L6P | ALLETPSLL | PE | 4290 |
| GLRA1-LIF_F6L | LIFNMLYWI | PE | 4291 |
| GOLGA3-SLD_P4L | SLDLTTSPV | PE | 4292 |
| GPR137B-KMS_S3P | KMPLANIYL | PE | 4293 |
| GPR174-FSF_P4S | FSFSLDFLV | PE | 4294 |
| GSTA4-FLQ_E4K | FLQKYTVKL | PE | 4295 |
| HAUS3-ILN_T7A | ILNAMIAKI | PE | 4296 |
| HBZ-KLS_A7T | KLSELHTYI | PE | 4297 |
| HERC1-SLL_PS | SLLLLSVSV | PE | 4298 |
| HLA-DRB5-YMA_KE | YMAELTVTL | PE | 4299 |
| HOXC9-YMY_G4D | YMYDSPGEL | PE | 4300 |
| HTR1F-10_V1M | MMPFSIVYIV | PE | 4301 |
| HTR1F-9_V1M | MMPFSIVYI | PE | 4302 |
| HTR1F-LVM_V2M | LMMPFSIVYI | PE | 4303 |
| IGF1-TMS_S4F | TMSFSHLFYL | PE | 4304 |
| IL17RA-FIT_TM | FIMGISILL | PE | 4305 |
| INTS1-VLL_L3F | VLFHRAFLV | PE | 4306 |
| IPO9-FSS_E4D | FSSDVLNLV | PE | 4307 |
| ITIH6-RLG_G3V | RLVPYLEFL | PE | 4308 |
| KAT6A-KLS_MK | KLSREIKPV | PE | 4309 |
| KCNB2-LLA_P6T | LLAILTYYV | PE | 4310 |
| KCNC3-FLP_A7V | FLPDLNVNA | PE | 4311 |
| KIF20B-YTS_S6L | YTSEILSPI | PE | 4312 |
| LCP1-NLF_PL | NLFNRYLAL | PE | 4313 |
| MAR11-10_F1L | LLIASVTWLL | PE | 4314 |
| MAR11-9_F1L | LLIASVTWL | PE | 4315 |
| ME1-FLD_A8G | FLDEFMEGV | PE | 4316 |
| MLL2-ALS_L8H | ALSPVIPHI | PE | 4317 |
| MPV17-YLW A5P | YLWPPVQLA | PE | 4318 |
| MRGPRF-RLW_R1W | WLWEPLRVV | PE | 4319 |
| MRM1-10_T6P | LLFGMPPCLL | PE | 4320 |
| MRM1-9_T6P | LLFGMPPCL | PE | 4321 |
| MYH4-GLD_D3N | GLNETIAKL | PE | 4322 |
| MYPN-RVI_R1L | LVIGMPPPV | PE | 4323 |
| NBPF24-LLD_E6G | LLDEKGPEV | PE | 4324 |
| NOS1-FID_D3Y | FIYQYYSSI | PE | 4325 |
| NSDHL-ILT_A9V | ILTGLNYEV | PE | 4326 |
| OASL-ILD_DN | ILNPADPTL | PE | 4327 |
| OR10A3-ILI_V6F | ILIVMFPFL | PE | 4328 |
| OR14C36-FML_V6L | FMLYLLTLM | PE | 4329 |
| OR1G1-FLF_T8M | FLFMYLVMV | PE | 4330 |
| OR2T1-FLN_F5L | FLNVLFPLL | PE | 4331 |
| OR5K2-YIF_GE | YIFLENLAL | PE | 4332 |
| OR5M3-KMV_T8N | KMVAVFYNT | PE | 4333 |
| OR6F1-VLN_T8M | VLNPFIYML | PE | 4334 |
| OR8B8-YVN_V2L | YLNELVVFV | PE | 4335 |
| OR8D4-10_G3E | FLEIYTVTVV | PE | 4336 |
| OR8D4-9_G3E | FLEIYTVTV | PE | 4337 |
| OR9Q2-FLF_S8F | FLFTFFAFI | PE | 4338 |
| OR9Q2-SID_S1F | FIDCYLLAI | PE | 4339 |
| OVOL1-SLL_L9V | SLLQGSPHV | PE | 4340 |
| PABPC1-MLG_R5Q | MLGEQLFPL | PE | 4341 |
| PCDHB3-FLF_SL | FLFLVLLFV | PE | 4342 |
| PELP1-LVL_L3F | LVFPLVMGV | PE | 4343 |
| PELP1-RLH_L7F | RLHDLVFPL | PE | 4344 |
| PGM5-AVG_H5Y | AVGSYVYSV | PE | 4345 |
| PHKA2-LLS_SF | LLSIIFFPA | PE | 4346 |
| PIGN-FLT_P7H | FLTVFSHFM | PE | 4347 |
| PLXNB1-VLF_V1L | LLFAAFSSA | PE | 4348 |
| PRSS16-LLL_L1Q | QLLVSLWGL | PE | 4349 |
| PTCHD4-HQL_G5V | HQLGVVVEV | PE | 4350 |
| PXDNL-SIL_S1F | FILDAVQRV | PE | 4351 |
| REV3L-KLS_R6H | KLSEYHNSL | PE | 4352 |
| RRP1B-LLA_L7F | LLADQNFKFI | PE | 4353 |
| RYR3-VLN_E6K | VLNYFKPYL | PE | 4354 |
| SCN3A-ALV_P7S | ALVGAISSI | PE | 4355 |
| SEC24A-FLY_P5L | FLYNLLTRV | PE | 4356 |
| SH3RF2-HMV MI | HIVEISTPV | PE | 4357 |
| SHROOM2-KLL_D6V | KLLAGVEIV | PE | 4358 |
| SLC15A2-ILG_G4E | ILGEQVVHTV | PE | 4359 |
| SLC16A7-AMA_P6L | AMAGSLVFL | PE | 4360 |
| SLC1A2-YMS_S3P | YMPTTIIAA | PE | 4361 |
| SLC2A3-ILV_L9M | ILVAQIFGM | PE | 4362 |
| SLC2A4-ILI_A4T | ILITQVLGL | PE | 4363 |
| SLC38A1-RIW_W3L | RILAALFLGL | PE | 4364 |
| SLC39A4-LLG_G4S | LLGSVVTVLL | PE | 4365 |
| SMARCD3-KLF_H8Y | KLFEFLVYGV | PE | 4366 |
| SMOX-KLA_KN | KLANPLPYT | PE | 4367 |
| SNX24-KLS_P6L | KLSHQLVLL | PE | 4368 |
| SPOPN1471-FLL_N7I | FLLDEAIGL | PE | 4369 |
| SREBF1-YLQ_L6M | YLQDSMATT | PE | 4370 |
| SSPN-10_S9F | FLMASISSFL | PE | 4371 |
| SSPN-9_S9F | FLMASISSF | PE | 4372 |
| SSPN-LMA_S8F | LMASISSFL | PE | 4373 |
| ST6GALNAC2- | LLFALHFSA | PE | 4374 |
| LLF_Y6H | | | |
| STOX1-RLM_M31 | RLIKHYPGI | PE | 4375 |
| TAS1R2-FMS_A4S | FMSSYSGVL | PE | 4376 |
| TBX3-GMG_T8M | GMGPLLAMV | PE | 4377 |
| TEAD1-SVL_L9F | SVLENFTIFL | PE | 4378 |
| TEAD1-VLE_L8F | VLENFTIFLV | PE | 4379 |
| TEX2-FLM_K8N | FLMTLETNM | PE | 4380 |
| TMEM127-VTF_L9V | VTFAVSFYVV | PE | 4381 |
| TMEM195-ALS_S3L | ALLQVTLLL | PE | 4382 |
| TP73-YTP_P3S | YTSEHAASV | PE | 4383 |
| TPP2-SLA_WL | SLAETFLET | PE | 4384 |
| TRIM16-RMA_R1T | TMAAISNTV | PE | 4385 |
| TRIM58-VLA_V1F | FLASPSVPL | PE | 4386 |
| TRIM58-YMV_V3F | YMFLASPSV | PE | 4387 |
| TRPC1-MLL_Q5H | MLLKHDVSL | PE | 4388 |
| TRPV3-LLL_A8V | LLLNMLIVL | PE | 4389 |
| TRPV4-FMI_A6T | FMIGYTSAL | PE | 4390 |
| TRPV4-YLL_A9T | YLLFMIGYT | PE | 4391 |
| TTLL12-KLP_N7D | KLPLDIDPV | PE | 4392 |
| UNC13A-SQL_S1F | FQLNQSFEI | PE | 4393 |
| USP28-LII_C5F | LIIPFIHLI | PE | 4394 |
| VN1R2-LML_L3F | LMFWASSSI | PE | 4395 |
| VN1R5-MII_S7Y | MIISHLYLI | PE | 4396 |
| WDR46-FLT T3I | FLIYLDVSV | PE | 4397 |
| ZDHHC17-LLL_T4I | LLLIFNVSV | PE | 4398 |
| ZDHHC7-SLL_P7L | SLLWMNLFV | PE | 4399 |
| ZFP9O-FTQ_EK | FTQEKVVYHV | PE | 4400 |
| ZNF827-NLF_S4I | NLFIQDISV | PE | 4401 |
| HCV-KLV (PE) | KLVALGINAV | PE | 4402 |
| HCV-KLV (APC) | KLVALGINAV | APC | 4403 |
| EMPTY | | APC | 4404 |
| EMPTY | | PE | 4405 |

### Example 3

### 3′ End Sequencing of Highly Multiplexed Single Cell RNA-Seq Libraries

[0248] 3′ end sequencing of RNA transcripts is a robust and popular method for analyzing transcriptome expression within a population of cells as well as single cells, though multiplexed single cell transcriptome sequencing has proved challenging. Populations of seemingly homogenous populations of cells are known to have a great deal of heterogeneity in gene expression, confounding bulk transcriptome sequencing. Current methods of single cell sequencing attempt to address that problem, though these methods have a relatively low throughput and are extremely costly. 3′ enrichment is challenging in the currently available methods as both 3′ and 5′ ends have the same adaptor sequence. The ability to highly multiplex is also limited with the primers available.

[0249] To address these challenges, a new method of 3′ end sequencing of RNA-seq libraries was developed for highly multiplexed samples. cDNA amplification was performed essentially as in the Smart-Seq2 protocol (Picelli et al., 2013) with several important modifications. A unique cell barcode is included in the reverse transcription (RT) primer, and a restriction digest (SalI) site is included in the template switching oligo (TSO) (Table 1) RT primers with unique cell barcodes were individually dispensed into each well of a 384-well PCR plate.

[0250] The workflow for the 3′ end sequencing is shown in FIG. 23A. Briefly, single cells are sorted into individual wells by indexed FACS sorting, and lysed. cDNA amplification is performed essentially as in the Smart-Seq2 protocol, but with the primers listed above (Picelli et al., 2013). After cDNA amplification, multiple single cell PCR products are pooled, each of which already has unique cell barcode at the 3′ end. After purification, PCR products are digested by restriction enzyme incubation. Libraries are then prepared from the digested products using a modified Nextera XT protocol in which custom primers designed to enrich 3′ end are used.

[0251] The libraries were then sequenced on an Illumina® NextSeq to a depth of 500,000 reads. The data was then analyzed using custom scripts. It was found that inclusion of restriction enzyme digestion improved recovery of 3′ end sequences significantly over other 3′ selection methods, recovering between 80 and 89% of 3′ end sequences that have cell barcode information (Table 11). Enrichment was measured as the number of reads with all of the correct barcode sequences in read1 divided by the total raw reads.

TABLE 11
3′ end enrichment

| | Percentage of | Genome Mapping |
|---|---|---|
| Method | 3′ end enrichment | percentage |
| w/o restriction enzyme digestion* | 12.96% | 9.64% |
| w/restriction enzyme digestion | 80.02% | 37.39% |
| w/restriction enzyme digestion and | 89.06% | 43.53% |
| gel purification | | |

*customized nextera PCR primer with four base pairs that are only complementary to the RT primer and mismatches to TSO

In addition to significantly enriching the 3′ ends of the transcripts, by using 384-well PCR plate the reaction volume is significantly decreased, while the ability to multiplex is significantly increased, compared to the original Smart-seq2 method.

[0252] Next, an ERCC spike-in was performed to validate this protocol 5 nl of 1:40,000 diluted ERCC were added into each well of sorted single cells. The data from the ERCC spike-in was then compared to published data. The method of 3′ end sequencing presented herein was shown to have a similar ERCC detection efficiency to published scRNA-seq data, demonstrating the reliability of this method (FIG. 23B). The correlation between the 3′ end-seq method presented herein and the original Smart-seq2 method was also found to be high (r²=0.924) when comparing normalized reads per million (RPM) (FIG. 23C).

[0253] Cross contamination during the 3′ end sequencing protocol was examined next. Human and Mouse cDNA were prepared separately according to the 3′ end sequencing method presented above, but with different cellular barcodes. The cDNAs were then mixed and sequenced as above. Sequencing data were mapped to human and mouse transcriptome respectively using Kallisto. The transcript mapping percentages were compared and it was found that there was a very low cross-contamination rate after sample pooling (FIG. 23D).

[0254] The methods disclosed herein allow for highly multiplexed RNA sequencing and will be increasingly valuable as scientists seek to understand and compare increasing numbers of single cells. As shown, these methods provide robust enhancement of 3′ ends of RNA for transcriptome profiling, and excellent multiplexing capabilities. 3′ end sequencing will also add another dimension to T cell profiling and can be incorporated into the TetTCR-seq workflow to assess the transcriptome of the targeted cells. These methods could be extended to methods with even greater multiplexing such as droplet and microwell based single cell RNA-seq or targeted amplification and sequencing selected genes, and digital PCR and sequencing methods.

### Example 4

[0255] Studies were performed to examine T cell antigen binding and their associated activation and phenotype in human CD8 cells.

[0256] In brief, each peptide barcode was individually in vitro transcribed/translated (IVTT) to generate corresponding peptide, which was later loaded onto MHC molecules. Then pMHC tetramer was tagged with its corresponding peptide barcode bearing a 3′ polyA overhang (FIG. 24). This enables the tetramer barcodes to be captured by BD Rhapsody beads and can be processed together with mRNA through BD Rhapsody. Similar as BD Rhapsody bioinformatic pipeline, peptide barcode sequencing reads from putative cells were extracted and mapped to peptide barcode reference. Only reads that are exact map were retained. The number of unique molecular identifiers (MIDs) was counted for each peptide barcode among individual cells.

[0257] Two passes were implemented to call tetramer specificity for each cell, in order to increase the precision. In the first pass, MID negative thresholds were then determined for foreign- and self-peptides respectively. Distribution of MID count aggregation was modeled through bimodal distribution. Specificities of putative tetramer positive cell were identified independently by inflection point of MID counts among all peptides. In the second pass, paired TCRa/b were further integrated with tetramer specificity called from first pass to correct for false positives and false negatives. It was assumed that T cells bearing same paired TCR α/β have the same tetramer specificity. Among T cells having multiple specificities (or tetramer negatives) associated with same TCR, their specificity was correct as the dominant tetramer specificity.

[0258] TetTCR-SeqHD was first applied on a mixture of polyclonal T cell populations, including IA2, PPI, GAD, HCV, HIV, FNDC3B-derived antigen specific clones (FIG. 25A-B). Over 80% of cells have paired TCR α/β (FIG. 25C). The peptide molecular counts were examined and three populations were easily observed, including self-antigen specific cells, foreign-antigen specific cells and a cross-reactive population (FIG. 25D). The TCR sequence of each cell represents its true tetramer specificity. After 1^{st} pass of tetramer specificity call, the precision of calling the correct tetramer specificity was found to be over 95% for all the clones with a FDR less than 5% (FIG. 26). Further analysis of the TCR sequences of each antigen specificity population recaptures the original distribution of TCR clonality (FIG. 27), further demonstrating the robustness of TetTCR-SeqHD to reveal the true identity of T cell antigen specificity.

[0259] After validation of TetTCR-SeqHD using T cell clones, this technology was further applied to study differences of foreign- and self-specific T cells from human primary CD8 T cells. A total of 80 self-specific peptides were curated through the IEDB database, as well as 33 influenza-, HIV-, EBV-, CVB, Rotaviruse- and HCV-derived peptides. Enriched CD8 T cells were processed from four different donors. The peptide molecular counts were evaluated with density plot and two populations were easily observed, self-antigen specific population and foreign-antigen specific population (FIG. 28A). Due to the low similarity of self- and foreign peptides, a significant cross-reactive population was not observed. Further, by applying self- and foreign peptide molecular count distribution, the negative threshold was bioinformatically inferred to call positive tetramer binding event for each experiment (FIG. 28B). The gene expression profiles for different antigen specificities were compared and it was found that self-antigen specific T cells are phenotypically different compared with foreign-antigen specific T cells (FIG. 29C-D). Moreover, TCR sequences were used to further prove the accuracy of antigen-specificity identification using pMHC DNA barcodes (FIG. 28E). The top 10 TCRs show minimal noisy antigen-specificity identification other than the true identity. Meanwhile, the ratio between self- and foreign-antigen specific T cells identified by pMHC DNA barcodes resembles the ratio from flow cytometry data for all the donors (FIG. 28F).

[0260] Last, it was also demonstrated that proteogenomics profile can be investigated in combination with TetTCR-SeqHD, using DNA-labeled antibody sequencing, such as CITE-seq or REAP-seq or the commercially available DNA-labeled antibodies, such as BD Ab-seq products or Biolegend TotalSeq (FIG. 29) (Stoeckius et al., 2017). Using DNA-labeled antibody, primary CD8 T cells can be easily separated into naïve, central memory, effector memory, effector CD8 T cells using canonical antibodies such as CCR7, CD45RA, CD45RO and CD95.

[0261] The method disclosed here in can be applied to study the phenotypic profiles of antigen specific T cells in various diseases, including but not limited to autoimmune diseases, such as type 1 diabetes, multiple sclerosis, Rheumatoid arthritis, Lupus, Celiac disesase and so on, various cancers, and infectious diseases.

[0262] All of the methods disclosed and claimed herein can be made and executed without undue experimentation in light of the present disclosure. While the compositions and methods of this invention have been described in terms of preferred embodiments, it will be apparent to those of skill in the art that variations may be applied to the methods and in the steps or in the sequence of steps of the method described herein without departing from the concept, spirit and scope of the invention. More specifically, it will be apparent that certain agents which are both chemically and physiologically related may be substituted for the agents described herein while the same or similar results would be achieved. All such similar substitutes and modifications apparent to those skilled in the art are deemed to be within the spirit, scope and concept of the invention as defined by the appended claims.

### REFERENCES

[0263] The following references, to the extent that they provide exemplary procedural or other details supplementary to those set forth herein, are specifically incorporated herein by reference.
[0264] Bentzen, A. K. et al. Nat Biotech 34, 1037-1045 (2016).
[0265] Bernard et al, Anal. Biochem., 273: 221-228 (1999).
[0266] Birnbaum, Michael E. et al. Cell 157, 1073-1087 (2014).
[0267] Bullock, T. N. J. et al. The Journal of Immunology 167, 5824-5831 (2001).
[0268] Cameron, B. J. et al. Science Translational Medicine 5, 197ra103-197ra103 (2013).
[0269] Carreno, B. M. et al. Science 348, 803-808 (2015).
[0270] Cohen, C. J. et al. The Journal of Clinical Investigation 125, 3981-3991 (2015).
[0271] Dietrich, P.-Y. et al. The Journal of Immunology 170, 5103-5109 (2003).
[0272] Dudley, M. E. et al. Science (New York, N.Y.) 298, 850-854 (2002).
[0273] Fu, G. K. et al. Analytical Chemistry 86, 2867-2870 (2014).
[0274] Glanville, J. et al. Nature 547, 94-98 (2017).
[0275] Lang, H. L. et al. Nature immunology 3, 940-943 (2002).
[0276] Luimstra et al., Journal of Experimental Medicine, 1-11 (2018).
[0277] Macoscko et al., Cell, 161(5): 1202-1214 (2015).
[0278] Mongkolsapaya, J. et al. Nat Med 9, 921-927 (2003).
[0279] Newell, E. W. & Davis, M. M. Nature biotechnology 32, 149-157 (2014).
[0280] Newell, E. W. et al. Nat Biotech 31, 623-629 (2013).
[0281] Peterson, V. M. et al. Nature Biotechnology 35, 936 (2017).
[0282] Picelli et al., Nature Methods, 10:1096-1098 (2013).
[0283] Picelli et al., Nature Protocols, 9(1): 171-181 (2014).
[0284] Rajasagi, M. et al. Blood 124, 453 (2014).
[0285] Ramskold et al., Nature Biotechnology, 30, 777-782 (2012).
[0286] Rodenko, B. et al. Nat. Protocols 1, 1120-1132 (2006).
[0287] Stoeckius et al., Nature Methods, 14, 865-868 (2017).
[0288] Stronen, E. et al. Science (2016).
[0289] Yu, W. et al. Immunity 42, 929-941 (2015).
[0290] Zhang, S.-Q. et al. Science Translational Medicine 8, 341ra377-341ra377 (2016).

What is claimed is:

1. A method for producing a DNA-barcoded peptide multimer comprising:
(a) performing in vitro transcription/translation (IVTT) on a peptide-encoding oligonucleotide to obtain a library of peptides;
(b) contacting the library of peptides with biotinylated MHC monomers comprising UV-cleavable peptides;
(c) applying UV light to exchange the UV-cleavable peptides on the MHC monomers with the library peptides to form peptide MHC monomers (pMHCs);
(d) combining the pMHCs with a multimer backbone comprising streptavidin, wherein streptavidin is linked to an oligonucleotide comprising the peptide-encoding oligonucleotide via a DNA handle comprising a molecular identifier (MID) to produce a DNA-barcoded peptide multimer.

2. The method of claim 1, wherein the multimer backbone comprising streptavidin is prepared by:
a. linking a DNA handle comprising the molecular identifier (MID) to streptavidin in a single batch; and
b. linking the oligonucleotide comprising the peptide-encoding oligonucleotide to the DNA handle in individual reactions, prior to combining the pMHCs with the multimer backbone.

3. The method of claim 2, wherein each DNA-barcoded pMHC multimer has a similar DNA handle:multimer backbone ratio.

4. The method of claim 2, wherein the DNA handle is linked to streptavidin comprising a fluorescent tag.

5. The method of claim 4, wherein the streptavidin is R-phycoerythrin-streptavidin or Allophycocyanin-streptavidin.

6. A method of generating a library of DNA-barcoded pMHC multimers comprising performing the method of any one of claim 1, with a plurality of peptide-encoding DNA oligonucleotides.

7. A DNA-barcoded peptide multimer library produced by the method of claim 1.

8. A method for determining the specificity of T cell receptors (TCRs), the method comprising:
(a) staining a plurality of T cells with a library of DNA-barcoded peptide multimers of claim 7, to generate peptide multimer-bound T cells;
(b) sorting the peptide multimer-bound T cells by separating the peptide multimer-bound T cells from unbound T cells;
(c) sequencing the molecular identifier (MID) of each peptide multimer and a cDNA encoding variable regions of TCR sequences of the T cell bound to said peptide multimer; and
(d) determining the copy number of DNA-barcoded peptide multimers bound to the corresponding T cell to determine TCR specificity, and wherein the copy number is determined by counting the number of copies of each MID.

9. The method of claim 8, wherein the sorting comprises performing flow cytometry.

10. The method of claim 8, wherein the sorting comprises separating single DNA-barcoded peptide multimer-bound T cells into separate reaction containers.

11. The method of claim 10, wherein the reaction container is multi-well plate.

12. The method of claim 8, wherein sequencing comprises preparing DNA-sequencing libraries, the preparing comprising at least one amplification step wherein a primer pair is used to amplify the MID and a different set of primer pairs is used to amplify variable regions of TCRα and TCRβ, sequences of the T cells.

13. A method for linking precursor T cells to their specific antigens comprising:
(a) staining a plurality of T cells with a library of DNA-barcoded peptide multimers of claim 7, to generate peptide multimer-bound T cells;
(b) enriching for peptide multimer-bound precursor T cells;
(c) sorting the peptide multimer-bound precursor T cells by separating the peptide multimer-bound T cells from unbound T cells;
(d) calculating the frequency of peptide multimer-bound precursor T cells;
(e) sequencing (i) the MID of each peptide multimer and (ii) a cDNA encoding variable regions of TCR sequences of the precursor T cells bound to said peptide multimer;
(f) determining the copy number of each DNA-barcoded peptide multimer bound to the corresponding precursor T cell to determine TCR specificity, wherein the copy number is determining by counting the number of copies of each MID.

14. The method of claim 13, wherein the sorting comprises performing flow cytometry.

15. The method of claim 13, wherein the sorting comprises separating single DNA-barcoded peptide multimer-bound T cells into separate reaction containers.

16. The method of claim 15, wherein the reaction container is multi-well plate.

17. The method of any one of claim 13, wherein sequencing comprises preparing DNA-sequencing libraries, the preparing comprising at least one amplification step wherein a primer pair is used to amplify the MID and a different set of primer pairs is used to amplify variable regions of TCRα and TCRβ sequences of the T cells.

The application's sequence listing, which the Patent Office published only in electronic form, follows.

SEQUENCE LISTING (4425 sequences)

SEQ ID NO: 1 - DNA, 52 bp, synthetic construct
  misc_feature 1..52: note = Description of sequence: Primer
  source 1..52: mol_type = other DNA
  variation 27..37: note = n is any one of a c g and t
  modified_base <1: mod_base = OTHER; note = Modified with a 12-carbon terminal end and 18-atom hexa-ethyleneglycol spacer
tagtactcagaggttgatctacattgnnnnnnnnnnngacgatgacgacaag

SEQ ID NO: 2 - DNA, 67 bp, synthetic construct
  misc_feature 1..67: note = Description of sequence: Primer
  source 1..67: mol_type = other DNA
gcgaattaatacgactcactatagggcttaagtataaggaggaaaacatatggacgatgacgacaag

SEQ ID NO: 3 - DNA, 47 bp, synthetic construct
  misc_feature 1..47: note = Description of sequence: Primer
  source 1..47: mol_type = other DNA
aaacccctccgtttagagaggggttatgctagcgaggtgcttcgtta

SEQ ID NO: 4 - DNA, 20 bp, synthetic construct
  misc_feature 1..20: note = Description of sequence: Primer
  source 1..20: mol_type = other DNA
tcagaggttgatctacattg

SEQ ID NO: 5 - DNA, 17 bp, synthetic construct
  misc_feature 1..17: note = Description of sequence: Primer
  source 1..17: mol_type = other DNA
agcgaggtgcttcgtta

SEQ ID NO: 6 - DNA, 54 bp, synthetic construct
  misc_feature 1..54: note = Description of sequence: Primer
  source 1..54: mol_type = other DNA
  variation 21: note = n is any one of a, c, g and t
  variation 23: note = n is any one of a, c, g and t
  variation 25: note = n is any one of a, c, g and t
gacgtgtgctcttccgatctnhnhnatcacgtactcagaggttgatctacattg

SEQ ID NO: 7 - DNA, 54 bp, synthetic construct
  misc_feature 1..54: note = Description of sequence: Primer
  source 1..54: mol_type = other DNA
  variation 21: note = n is any one of a, c, g and t
  variation 23: note = n is any one of a, c, g and t
  variation 25: note = n is any one of a, c, g and t
gacgtgtgctcttccgatctnhnhncgatgttactcagaggttgatctacattg

SEQ ID NO: 8 - DNA, 54 bp, synthetic construct
  misc_feature 1..54: note = Description of sequence: Primer
  source 1..54: mol_type = other DNA
  variation 21: note = n is any one of a, c, g and t
  variation 23: note = n is any one of a, c, g and t
  variation 25: note = n is any one of a, c, g and t
gacgtgtgctcttccgatctnhnhnttaggctactcagaggttgatctacattg

SEQ ID NO: 9 - DNA, 54 bp, synthetic construct
  misc_feature 1..54: note = Description of sequence: Primer
  source 1..54: mol_type = other DNA
  variation 21: note = n is any one of a, c, g and t
  variation 23: note = n is any one of a, c, g and t
  variation 25: note = n is any one of a, c, g and t
gacgtgtgctcttccgatctnhnhntgaccatactcagaggttgatctacattg

SEQ ID NO: 10 - DNA, 54 bp, synthetic construct
  misc_feature 1..54: note = Description of sequence: Primer
  source 1..54: mol_type = other DNA
  variation 21: note = n is any one of a, c, g and t
  variation 23: note = n is any one of a, c, g and t
  variation 25: note = n is any one of a, c, g and t
gacgtgtgctcttccgatctnhnhnacagtgtactcagaggttgatctacattg

SEQ ID NO: 11 - DNA, 54 bp, synthetic construct
  misc_feature 1..54: note = Description of sequence: Primer
  source 1..54: mol_type = other DNA
  variation 21: note = n is any one of a, c, g and t
  variation 23: note = n is any one of a, c, g and t
  variation 25: note = n is any one of a, c, g and t
gacgtgtgctcttccgatctnhnhngccaattactcagaggttgatctacattg

SEQ ID NO: 12 - DNA, 54 bp, synthetic construct
  misc_feature 1..54: note = Description of sequence: Primer
  source 1..54: mol_type = other DNA
  variation 21: note = n is any one of a, c, g and t
  variation 23: note = n is any one of a, c, g and t
  variation 25: note = n is any one of a, c, g and t
gacgtgtgctcttccgatctnhnhncagatctactcagaggttgatctacattg

SEQ ID NO: 13 - DNA, 54 bp, synthetic construct
  misc_feature 1..54: note = Description of sequence: Primer
  source 1..54: mol_type = other DNA
  variation 21: note = n is any one of a, c, g and t
  variation 23: note = n is any one of a, c, g and t
  variation 25: note = n is any one of a, c, g and t
gacgtgtgctcttccgatctnhnhnacttgatactcagaggttgatctacattg

SEQ ID NO: 14 - DNA, 54 bp, synthetic construct
  misc_feature 1..54: note = Description of sequence: Primer
  source 1..54: mol_type = other DNA
  variation 21: note = n is any one of a, c, g and t
  variation 23: note = n is any one of a, c, g and t
  variation 25: note = n is any one of a, c, g and t
gacgtgtgctcttccgatctnhnhngatcagtactcagaggttgatctacattg

SEQ ID NO: 15 - DNA, 54 bp, synthetic construct
  misc_feature 1..54: note = Description of sequence: Primer
  source 1..54: mol_type = other DNA
  variation 21: note = n is any one of a, c, g and t
  variation 23: note = n is any one of a, c, g and t
  variation 25: note = n is any one of a, c, g and t
gacgtgtgctcttccgatctnhnhntagctttactcagaggttgatctacattg

SEQ ID NO: 16 - DNA, 54 bp, synthetic construct
  misc_feature 1..54: note = Description of sequence: Primer
  source 1..54: mol_type = other DNA
  variation 21: note = n is any one of a, c, g and t
  variation 23: note = n is any one of a, c, g and t
  variation 25: note = n is any one of a, c, g and t
gacgtgtgctcttccgatctnhnhnggctactactcagaggttgatctacattg

SEQ ID NO: 17 - DNA, 54 bp, synthetic construct
  misc_feature 1..54: note = Description of sequence: Primer
  source 1..54: mol_type = other DNA
  variation 21: note = n is any one of a, c, g and t
  variation 23: note = n is any one of a, c, g and t
  variation 25: note = n is any one of a, c, g and t
gacgtgtgctcttccgatctnhnhncttgtatactcagaggttgatctacattg

SEQ ID NO: 18 - DNA, 60 bp, synthetic construct
  misc_feature 1..60: note = Description of sequence: Primer
  source 1..60: mol_type = other DNA
  variation 34: note = n is any one of a, c, g and t
  variation 36: note = n is any one of a, c, g and t
  variation 38: note = n is any one of a, c, g and t
acactctttccctacacgacgctcttccgatctnhnhntcaagagcgaggtgcttcgtta

SEQ ID NO: 19 - DNA, 60 bp, synthetic construct
  misc_feature 1..60: note = Description of sequence: Primer
  source 1..60: mol_type = other DNA
  variation 34: note = n is any one of a, c, g and t
  variation 36: note = n is any one of a, c, g and t
  variation 38: note = n is any one of a, c, g and t
acactctttccctacacgacgctcttccgatctnhnhnaacacagcgaggtgcttcgtta

SEQ ID NO: 20 - DNA, 60 bp, synthetic construct
  misc_feature 1..60: note = Description of sequence: Primer
  source 1..60: mol_type = other DNA
  variation 34: note = n is any one of a, c, g and t
  variation 36: note = n is any one of a, c, g and t
  variation 38: note = n is any one of a, c, g and t
acactctttccctacacgacgctcttccgatctnhnhnacataagcgaggtgcttcgtta

SEQ ID NO: 21 - DNA, 60 bp, synthetic construct
  misc_feature 1..60: note = Description of sequence: Primer
  source 1..60: mol_type = other DNA
  variation 34: note = n is any one of a, c, g and t
  variation 36: note = n is any one of a, c, g and t
  variation 38: note = n is any one of a, c, g and t
acactctttccctacacgacgctcttccgatctnhnhntaagaagcgaggtgcttcgtta

SEQ ID NO: 22 - DNA, 60 bp, synthetic construct; identical to SEQ ID NO: 18
  misc_feature 1..60: note = Description of sequence: Primer
  source 1..60: mol_type = other DNA
  variation 34: note = n is any one of a, c, g and t
  variation 36: note = n is any one of a, c, g and t
  variation 38: note = n is any one of a, c, g and t

SEQ ID NO: 23 - DNA, 60 bp, synthetic construct
  misc_feature 1..60: note = Description of sequence: Primer
  source 1..60: mol_type = other DNA
  variation 34: note = n is any one of a, c, g and t
  variation 36: note = n is any one of a, c, g and t
  variation 38: note = n is any one of a, c, g and t
acactctttccctacacgacgctcttccgatctnhnhnagtttagcgaggtgcttcgtta

SEQ ID NO: 24 - DNA, 60 bp, synthetic construct
  misc_feature 1..60: note = Description of sequence: Primer
  source 1..60: mol_type = other DNA
  variation 34: note = n is any one of a, c, g and t
  variation 36: note = n is any one of a, c, g and t
  variation 38: note = n is any one of a, c, g and t
acactctttccctacacgacgctcttccgatctnhnhnatacaagcgaggtgcttcgtta

SEQ ID NO: 25 - DNA, 60 bp, synthetic construct
  misc_feature 1..60: note = Description of sequence: Primer
  source 1..60: mol_type = other DNA
  variation 34: note = n is any one of a, c, g and t
  variation 36: note = n is any one of a, c, g and t
  variation 38: note = n is any one of a, c, g and t
acactctttccctacacgacgctcttccgatctnhnhnttatgagcgaggtgcttcgtta

SEQ ID NO: 26 - DNA, 45 bp, synthetic construct
  misc_feature 1..45: note = Description of sequence: Primer
  source 1..45: mol_type = other DNA
aatgatacggcgaccaccgagatctacactctttccctacacgac

SEQ ID NO: 27 - DNA, 80 bp, synthetic construct
  misc_feature 1..80: note = Description of sequence: Primer
  source 1..80: mol_type = other DNA
  misc_difference 27..46: note = n is any one of a, c, g and t
  misc_difference 31..46: note = this poistion may be absent
caagcagaagacggcatacgagataannnnnnnnnnnnnnnnnnnngtgactggagttcagacgtgtgctcttccgatct

SEQ ID NO: 28 - DNA, 57 bp, synthetic construct
  misc_feature 1..57: note = Description of sequence: Primer
  source 1..57: mol_type = other DNA
cgaggtgcttcgttacaggatgatgtttttgtccatgatagccttgtcgtcatcgtc

SEQ ID NO: 29 - DNA, 57 bp, synthetic construct
  misc_feature 1..57: note = Description of sequence: Primer
  source 1..57: mol_type = other DNA
cgaggtgcttcgttacagtttaactttgatgttcagcagagccttgtcgtcatcgtc

SEQ ID NO: 30 - DNA, 57 bp, synthetic construct
  misc_feature 1..57: note = Description of sequence: Primer
  source 1..57: mol_type = other DNA
cgaggtgcttcgttaaacgtgcagagatttgtccatcagagccttgtcgtcatcgtc

SEQ ID NO: 31 - DNA, 57 bp, synthetic construct
  misc_feature 1..57: note = Description of sequence: Primer
  source 1..57: mol_type = other DNA
cgaggtgcttcgttacaggtagatgtggtggtcagacagagccttgtcgtcatcgtc

SEQ ID NO: 32 - DNA, 57 bp, synthetic construct
  misc_feature 1..57: note = Description of sequence: Primer
  source 1..57: mol_type = other DNA
cgaggtgcttcgttatgctgcaggatcaggaccccacagtgccttgtcgtcatcgtc

SEQ ID NO: 33 - DNA, 60 bp, synthetic construct
  misc_feature 1..60: note = Description of sequence: Primer
  source 1..60: mol_type = other DNA
cgaggtgcttcgttaagctgctgccggatcaggaccccacagtgccttgtcgtcatcgtc

SEQ ID NO: 34 - DNA, 57 bp, synthetic construct
  misc_feature 1..57: note = Description of sequence: Primer
  source 1..57: mol_type = other DNA
cgaggtgcttcgttacagcggcagcagacgcatccacagagccttgtcgtcatcgtc

SEQ ID NO: 35 - DNA, 60 bp, synthetic construct
  misc_feature 1..60: note = Description of sequence: Primer
  source 1..60: mol_type = other DNA
cgaggtgcttcgttaaacttccatcgtgtgggtgcccagcatagccttgtcgtcatcgtc

SEQ ID NO: 36 - DNA, 57 bp, synthetic construct
  misc_feature 1..57: note = Description of sequence: Primer
  source 1..57: mol_type = other DNA
cgaggtgcttcgttaaacggtccagcaaacaccattgatgcacttgtcgtcatcgtc

SEQ ID NO: 37 - DNA, 57 bp, synthetic construct
  misc_feature 1..57: note = Description of sequence: Primer
  source 1..57: mol_type = other DNA
cgaggtgcttcgttaaaccatcgtcagcagaccacccaggcacttgtcgtcatcgtc

SEQ ID NO: 38 - DNA, 60 bp, synthetic construct
  misc_feature 1..60: note = Description of sequence: Primer
  source 1..60: mol_type = other DNA
cgaggtgcttcgttatgcagaggtctggaaactccacagcaggcacttgtcgtcatcgtc

SEQ ID NO: 39 - DNA, 57 bp, synthetic construct
  misc_feature 1..57: note = Description of sequence: Primer
  source 1..57: mol_type = other DNA
cgaggtgcttcgttaaacagcttccagcagcaggtgcatacacttgtcgtcatcgtc

SEQ ID NO: 40 - DNA, 57 bp, synthetic construct
  misc_feature 1..57: note = Description of sequence: Primer
  source 1..57: mol_type = other DNA
cgaggtgcttcgttacaggtagaatgcgtgttcccacatatccttgtcgtcatcgtc

SEQ ID NO: 41 - DNA, 60 bp, synthetic construct
  misc_feature 1..60: note = Description of sequence: Primer
  source 1..60: mol_type = other DNA
cgaggtgcttcgttaaacggtcaggataccgataccagccagttccttgtcgtcatcgtc

SEQ ID NO: 42 - DNA, 57 bp, synthetic construct
  misc_feature 1..57: note = Description of sequence: Primer
  source 1..57: mol_type = other DNA
cgaggtgcttcgttaaacctggcagatgtaagagtcaatgaacttgtcgtcatcgtc

SEQ ID NO: 43 - DNA, 57 bp, synthetic construct
  misc_feature 1..57: note = Description of sequence: Primer
  source 1..57: mol_type = other DNA
cgaggtgcttcgttacaggtagaaaccaacagcgaacaggaacttgtcgtcatcgtc

SEQ ID NO: 44 - DNA, 57 bp, synthetic construct
  misc_feature 1..57: note = Description of sequence: Primer
  source 1..57: mol_type = other DNA
cgaggtgcttcgttacagagcaacagacagaacgatcaggaacttgtcgtcatcgtc

SEQ ID NO: 45 - DNA, 60 bp, synthetic construct
  misc_feature 1..60: note = Description of sequence: Primer
  source 1..60: mol_type = other DNA
cgaggtgcttcgttaaacagacgggaagaagtcagacggcaggaacttgtcgtcatcgtc

SEQ ID NO: 46 - DNA, 57 bp, synthetic construct
  misc_feature 1..57: note = Description of sequence: Primer
  source 1..57: mol_type = other DNA
cgaggtgcttcgttagatcagcatgaaaacagaccacaggaacttgtcgtcatcgtc

SEQ ID NO: 47 - DNA, 57 bp, synthetic construct
  misc_feature 1..57: note = Description of sequence: Primer
  source 1..57: mol_type = other DNA
cgaggtgcttcgttacagcagcagagccagagcgtacaggaacttgtcgtcatcgtc

SEQ ID NO: 48 - DNA, 57 bp, synthetic construct
  misc_feature 1..57: note = Description of sequence: Primer
  source 1..57: mol_type = other DNA
cgaggtgcttcgttagatttcgtagatgaatttgttcataaacttgtcgtcatcgtc

SEQ ID NO: 49 - DNA, 57 bp, synthetic construct
  misc_feature 1..57: note = Description of sequence: Primer
  source 1..57: mol_type = other DNA
cgaggtgcttcgttagatgaagtggaagtcagagtacatgaacttgtcgtcatcgtc

SEQ ID NO: 50 - DNA, 57 bp, synthetic construct
  misc_feature 1..57: note = Description of sequence: Primer
  source 1..57: mol_type = other DNA
cgaggtgcttcgttaaacgtcggtaaagaattcacccacaaacttgtcgtcatcgtc

SEQ ID NO: 51 - DNA, 57 bp, synthetic construct
  misc_feature 1..57: note = Description of sequence: Primer
  source 1..57: mol_type = other DNA
cgaggtgcttcgttacagggtgaaaacaaaacccagaatgcccttgtcgtcatcgtc

SEQ ID NO: 52 - DNA, 57 bp, synthetic construct
  misc_feature 1..57: note = Description of sequence: Primer
  source 1..57: mol_type = other DNA
cgaggtgcttcgttacagcatagcaaccagcgtgcacaggcccttgtcgtcatcgtc

SEQ ID NO: 53 - DNA, 57 bp, synthetic construct
  misc_feature 1..57: note = Description of sequence: Primer
  source 1..57: mol_type = other DNA
cgaggtgcttcgttacagagacggagcgtggtgcagcagacccttgtcgtcatcgtc

SEQ ID NO: 54 - DNA, 57 bp, synthetic construct
  misc_feature 1..57: note = Description of sequence: Primer
  source 1..57: mol_type = other DNA
cgaggtgcttcgttacagttcttcttccagagacagcagacccttgtcgtcatcgtc

SEQ ID NO: 55 - DNA, 60 bp, synthetic construct
  misc_feature 1..60: note = Description of sequence: Primer
  source 1..60: mol_type = other DNA
cgaggtgcttcgttacaggaaacggttcaggttcggagacagacccttgtcgtcatcgtc

SEQ ID NO: 56 - DNA, 57 bp, synthetic construct
  misc_feature 1..57: note = Description of sequence: Primer
  source 1..57: mol_type = other DNA
cgaggtgcttcgttacaggtgttccataccgtcgtacagacccttgtcgtcatcgtc

SEQ ID NO: 57 - DNA, 57 bp, synthetic construct
  misc_feature 1..57: note = Description of sequence: Primer
  source 1..57: mol_type = other DNA
cgaggtgcttcgttaaaccaggtacagagcttcaaccaggtgcttgtcgtcatcgtc

SEQ ID NO: 58 - DNA, 60 bp, synthetic construct
  misc_feature 1..60: note = Description of sequence: Primer
  source 1..60: mol_type = other DNA
cgaggtgcttcgttaaacagacagaacaccgtcaacagccaggatcttgtcgtcatcgtc

SEQ ID NO: 59 - DNA, 57 bp, synthetic construct
  misc_feature 1..57: note = Description of sequence: Primer
  source 1..57: mol_type = other DNA
cgaggtgcttcgttaaacaccgtgcaccggctctttcaggatcttgtcgtcatcgtc

SEQ ID NO: 60 - DNA, 57 bp, synthetic construct
  misc_feature 1..57: note = Description of sequence: Primer
  source 1..57: mol_type = other DNA
cgaggtgcttcgttacagtttgtggatgtgttccatcaggatcttgtcgtcatcgtc

SEQ ID NO: 61 - DNA, 60 bp, synthetic construct
  misc_feature 1..60: note = Description of sequence: Primer
  source 1..60: mol_type = other DNA
cgaggtgcttcgttaaacgtattgcagatcttgacccggcaggatcttgtcgtcatcgtc

SEQ ID NO: 62 - DNA, 57 bp, synthetic construct
  misc_feature 1..57: note = Description of sequence: Primer
  source 1..57: mol_type = other DNA
cgaggtgcttcgttaaacgcctttggtgatgtcggtcaggatcttgtcgtcatcgtc

SEQ ID NO: 63 - DNA, 57 bp, synthetic construct
  misc_feature 1..57: note = Description of sequence: Primer
  source 1..57: mol_type = other DNA
cgaggtgcttcgttaaacagagaacggaacctggtccatgatcttgtcgtcatcgtc

SEQ ID NO: 64 - DNA, 57 bp, synthetic construct
  misc_feature 1..57: note = Description of sequence: Primer
  source 1..57: mol_type = other DNA
cgaggtgcttcgttaaacacgttccagggcttccagcatgatcttgtcgtcatcgtc

SEQ ID NO: 65 - DNA, 57 bp, synthetic construct
  misc_feature 1..57: note = Description of sequence: Primer
  source 1..57: mol_type = other DNA
cgaggtgcttcgttaaacagaaaacggaacttgatcggtgatcttgtcgtcatcgtc

SEQ ID NO: 66 - DNA, 60 bp, synthetic construct
  misc_feature 1..60: note = Description of sequence: Primer
  source 1..60: mol_type = other DNA
cgaggtgcttcgttaaacagcgttaatacccagagcaacaattttcttgtcgtcatcgtc

SEQ ID NO: 67 - DNA, 57 bp, synthetic construct
  misc_feature 1..57: note = Description of sequence: Primer
  source 1..57: mol_type = other DNA
cgaggtgcttcgttacagaacaatcaggaacacttgcagtttcttgtcgtcatcgtc

SEQ ID NO: 68 - DNA, 57 bp, synthetic construct
  misc_feature 1..57: note = Description of sequence: Primer
  source 1..57: mol_type = other DNA
cgaggtgcttcgttaagccagcaggtcaccttcagacagtttcttgtcgtcatcgtc

SEQ ID NO: 69 - DNA, 60 bp, synthetic construct
  misc_feature 1..60: note = Description of sequence: Primer
  source 1..60: mol_type = other DNA
cgaggtgcttcgttaaacagcgttgatacccagagcaaccagtttcttgtcgtcatcgtc

SEQ ID NO: 70 - DNA, 60 bp, synthetic construct
  misc_feature 1..60: note = Description of sequence: Primer
  source 1..60: mol_type = other DNA
cgaggtgcttcgttacacattgttgatacccagtgcaaccagtttcttgtcgtcatcgtc

SEQ ID NO: 71 - DNA, 57 bp, synthetic construct
  misc_feature 1..57: note = Description of sequence: Primer
  source 1..57: mol_type = other DNA
cgaggtgcttcgttacacttgccaatactgaccccaggttttcttgtcgtcatcgtc

SEQ ID NO: 72 - DNA, 60 bp, synthetic construct
  misc_feature 1..60: note = Description of sequence: Primer
  source 1..60: mol_type = other DNA
cgaggtgcttcgttacagagcggtaacctgaccagcgcacagcagcttgtcgtcatcgtc

SEQ ID NO: 73 - DNA, 60 bp, synthetic construct
  misc_feature 1..60: note = Description of sequence: Primer
  source 1..60: mol_type = other DNA
cgaggtgcttcgttaaacttcgatcagagccagaccgaacagcagcttgtcgtcatcgtc

SEQ ID NO: 74 - DNA, 57 bp, synthetic construct
  misc_feature 1..57: note = Description of sequence: Primer
  source 1..57: mol_type = other DNA
cgaggtgcttcgttacacataaaccgggtaaccaaacagcagcttgtcgtcatcgtc

SEQ ID NO: 75 - DNA, 60 bp, synthetic construct
  misc_feature 1..60: note = Description of sequence: Primer
  source 1..60: mol_type = other DNA
cgaggtgcttcgttaaacccagccacccaggatgttgaacagcagcttgtcgtcatcgtc

SEQ ID NO: 76 - DNA, 57 bp, synthetic construct
  misc_feature 1..57: note = Description of sequence: Primer
  source 1..57: mol_type = other DNA
cgaggtgcttcgttaaacaaacatgcaggttgcgcccagcagcttgtcgtcatcgtc

SEQ ID NO: 77 - DNA, 60 bp, synthetic construct
  misc_feature 1..60: note = Description of sequence: Primer
  source 1..60: mol_type = other DNA
cgaggtgcttcgttacagcaggaaagaggtcaggtcgatcagcagcttgtcgtcatcgtc

SEQ ID NO: 78 - DNA, 57 bp, synthetic construct
  misc_feature 1..57: note = Description of sequence: Primer
  source 1..57: mol_type = other DNA
cgaggtgcttcgttacagccacagagagaacagagacagcagcttgtcgtcatcgtc

SEQ ID NO: 79 - DNA, 57 bp, synthetic construct
  misc_feature 1..57: note = Description of sequence: Primer
  source 1..57: mol_type = other DNA
cgaggtgcttcgttaaacagccatcggaccgttccacagcagcttgtcgtcatcgtc

SEQ ID NO: 80 - DNA, 57 bp, synthetic construct
  misc_feature 1..57: note = Description of sequence: Primer
  source 1..57: mol_type = other DNA
cgaggtgcttcgttaaacattgatagacgggatgttcagcatcttgtcgtcatcgtc

SEQ ID NO: 81 - DNA, 57 bp, synthetic construct
  misc_feature 1..57: note = Description of sequence: Primer
  source 1..57: mol_type = other DNA
cgaggtgcttcgttacagcggcagcaggtgctggtacagcatcttgtcgtcatcgtc

SEQ ID NO: 82 - DNA, 57 bp, synthetic construct
  misc_feature 1..57: note = Description of sequence: Primer
  source 1..57: mol_type = other DNA
cgaggtgcttcgttaaacggtgcaaccagattcccaaaccatcttgtcgtcatcgtc

SEQ ID NO: 83 - DNA, 60 bp, synthetic construct
  misc_feature 1..60: note = Description of sequence: Primer
  source 1..60: mol_type = other DNA
cgaggtgcttcgttaaacggtagccaggtcggtctgagccaggttcttgtcgtcatcgtc

SEQ ID NO: 84 - DNA, 57 bp, synthetic construct
  misc_feature 1..57: note = Description of sequence: Primer
  source 1..57: mol_type = other DNA
cgaggtgcttcgttaaacggtagcaaccatcggaaccaggttcttgtcgtcatcgtc

SEQ ID NO: 85 - DNA, 57 bp, synthetic construct
  misc_feature 1..57: note = Description of sequence: Primer
  source 1..57: mol_type = other DNA
cgaggtgcttcgttaaacaacatccatgcacgggatcagctgcttgtcgtcatcgtc

SEQ ID NO: 86 - DNA, 57 bp, synthetic construct
  misc_feature 1..57: note = Description of sequence: Primer
  source 1..57: mol_type = other DNA
cgaggtgcttcgttacagagaggtcagagcgcacagcagacgcttgtcgtcatcgtc

SEQ ID NO: 87 - DNA, 57 bp, synthetic construct
  misc_feature 1..57: note = Description of sequence: Primer
  source 1..57: mol_type = other DNA
cgaggtgcttcgttacagcagagccagcagcggcagcagacgcttgtcgtcatcgtc

SEQ ID NO: 88 - DNA, 57 bp, synthetic construct
  misc_feature 1..57: note = Description of sequence: Primer
  source 1..57: mol_type = other DNA
cgaggtgcttcgttacaggtacggtgcgttcgggaacatgcgcttgtcgtcatcgtc

SEQ ID NO: 89 - DNA, 60 bp, synthetic construct
  misc_feature 1..60: note = Description of sequence: Primer
  source 1..60: mol_type = other DNA
cgaggtgcttcgttaaaccatcgtggtgccatattccatcatacgcttgtcgtcatcgtc

SEQ ID NO: 90 - DNA, 60 bp, synthetic construct
  misc_feature 1..60: note = Description of sequence: Primer
  source 1..60: mol_type = other DNA
cgaggtgcttcgttaaaccaggtacagagcttcaaccagatgtgacttgtcgtcatcgtc

SEQ ID NO: 91 - DNA, 57 bp, synthetic construct
  misc_feature 1..57: note = Description of sequence: Primer
  source 1..57: mol_type = other DNA
cgaggtgcttcgttaaacttccagcagacggccaatgatagacttgtcgtcatcgtc

SEQ ID NO: 92 - DNA, 57 bp, synthetic construct
  misc_feature 1..57: note = Description of sequence: Primer
  source 1..57: mol_type = other DNA
cgaggtgcttcgttacagcagtttaacaccagcagccagagacttgtcgtcatcgtc

SEQ ID NO: 93 - DNA, 57 bp, synthetic construct
  misc_feature 1..57: note = Description of sequence: Primer
  source 1..57: mol_type = other DNA
cgaggtgcttcgttaagcctgggtgatccacatcagcagagacttgtcgtcatcgtc

SEQ ID NO: 94 - DNA, 57 bp, synthetic construct
  misc_feature 1..57: note = Description of sequence: Primer
  source 1..57: mol_type = other DNA
cgaggtgcttcgttaaacctgggtgatccacatcagcagagacttgtcgtcatcgtc

SEQ ID NO: 95 - DNA, 57 bp, synthetic construct
  misc_feature 1..57: note = Description of sequence: Primer
  source 1..57: mol_type = other DNA
cgaggtgcttcgttaagcgtagtaaacggtgatcggcagagacttgtcgtcatcgtc

SEQ ID NO: 96 - DNA, 57 bp, synthetic construct
  misc_feature 1..57: note = Description of sequence: Primer
  source 1..57: mol_type = other DNA
cgaggtgcttcgttacagttcagcctgcagcggagacagagacttgtcgtcatcgtc

SEQ ID NO: 97 - DNA, 60 bp, synthetic construct
  misc_feature 1..60: note = Description of sequence: Primer
  source 1..60: mol_type = other DNA
cgaggtgcttcgttaaacagcgttgatacccagagcaaccagagacttgtcgtcatcgtc

SEQ ID NO: 98 - DNA, 60 bp, synthetic construct
  misc_feature 1..60: note = Description of sequence: Primer
  source 1..60: mol_type = other DNA
cgaggtgcttcgttacaggttaacttcgtaaacgtggtacagagacttgtcgtcatcgtc

SEQ ID NO: 99 - DNA, 57 bp, synthetic construct
  misc_feature 1..57: note = Description of sequence: Primer
  source 1..57: mol_type = other DNA
cgaggtgcttcgttacagggtagccacggtgttatacagagacttgtcgtcatcgtc

SEQ ID NO: 100 - DNA, 60 bp, synthetic construct
  misc_feature 1..60: note = Description of sequence: Primer
  source 1..60: mol_type = other DNA
cgaggtgcttcgttaaacgccaacttcaaaaacacggtacatagacttgtcgtcatcgtc

SEQ ID NO: 101 - DNA, 57 bp, synthetic construct
  misc_feature 1..57: note = Description of sequence: Primer
  source 1..57: mol_type = other DNA
cgaggtgcttcgttaaacacccgtaatggtactagcaacagacttgtcgtcatcgtc

SEQ ID NO: 102 - DNA, 60 bp, synthetic construct
  misc_feature 1..60: note = Description of sequence: Primer
  source 1..60: mol_type = other DNA
cgaggtgcttcgttaaacaggcatcggagacggttttgacagggtcttgtcgtcatcgtc

SEQ ID NO: 103 - DNA, 57 bp, synthetic construct
  misc_feature 1..57: note = Description of sequence: Primer
  source 1..57: mol_type = other DNA
cgaggtgcttcgttaaacggtcagaacaatgttagcagcaaccttgtcgtcatcgtc

SEQ ID NO: 104 - DNA, 57 bp, synthetic construct
  misc_feature 1..57: note = Description of sequence: Primer
  source 1..57: mol_type = other DNA
cgaggtgcttcgttaaaccagcggggtcagcataacaataaccttgtcgtcatcgtc

SEQ ID NO: 105 - DNA, 57 bp, synthetic construct
  misc_feature 1..57: note = Description of sequence: Primer
  source 1..57: mol_type = other DNA
cgaggtgcttcgttacagcataacagaggtttcttccagaaccttgtcgtcatcgtc

SEQ ID NO: 106 - DNA, 57 bp, synthetic construct
  misc_feature 1..57: note = Description of sequence: Primer
  source 1..57: mol_type = other DNA
cgaggtgcttcgttagatagcgaaacccagaccgaacagaaccttgtcgtcatcgtc

SEQ ID NO: 107 - DNA, 57 bp, synthetic construct
  misc_feature 1..57: note = Description of sequence: Primer
  source 1..57: mol_type = other DNA
cgaggtgcttcgttatgcttccagcaggtcgtcgtgcagaaccttgtcgtcatcgtc

SEQ ID NO: 108 - DNA, 60 bp, synthetic construct
  misc_feature 1..60: note = Description of sequence: Primer
  source 1..60: mol_type = other DNA
cgaggtgcttcgttattcaacacccggaacaccacccatcagaaccttgtcgtcatcgtc

SEQ ID NO: 109 - DNA, 60 bp, synthetic construct
  misc_feature 1..60: note = Description of sequence: Primer
  source 1..60: mol_type = other DNA
cgaggtgcttcgttaaacagccagagaagaaacaataatcataaccttgtcgtcatcgtc

SEQ ID NO: 110 - DNA, 60 bp, synthetic construct
  misc_feature 1..60: note = Description of sequence: Primer
  source 1..60: mol_type = other DNA
cgaggtgcttcgttaaaccacgtattgcagcaggatgttcataaccttgtcgtcatcgtc

SEQ ID NO: 111 - DNA, 57 bp, synthetic construct
  misc_feature 1..57: note = Description of sequence: Primer
  source 1..57: mol_type = other DNA
cgaggtgcttcgttagaggtacaccagaacaccagtaacaaccttgtcgtcatcgtc

SEQ ID NO: 112 - DNA, 57 bp, synthetic construct
  misc_feature 1..57: note = Description of sequence: Primer
  source 1..57: mol_type = other DNA
cgaggtgcttcgttacagggttgaagtgcccggcagtaaccacttgtcgtcatcgtc

SEQ ID NO: 113 - DNA, 57 bp, synthetic construct
  misc_feature 1..57: note = Description of sequence: Primer
  source 1..57: mol_type = other DNA
cgaggtgcttcgttaaacagtagaagtacccggcagtaaccacttgtcgtcatcgtc

SEQ ID NO: 114 - DNA, 57 bp, synthetic construct
  misc_feature 1..57: note = Description of sequence: Primer
  source 1..57: mol_type = other DNA
cgaggtgcttcgttaaacaaacggaaccagcagagacagccacttgtcgtcatcgtc

SEQ ID NO: 115 - DNA, 57 bp, synthetic construct
  misc_feature 1..57: note = Description of sequence: Primer
  source 1..57: mol_type = other DNA
cgaggtgcttcgttaagcggtaaccggaccaggttccaggtacttgtcgtcatcgtc

SEQ ID NO: 116 - DNA, 57 bp, synthetic construct
  misc_feature 1..57: note = Description of sequence: Primer
  source 1..57: mol_type = other DNA
cgaggtgcttcgttagatgtgcacgatagccggtaacaggtacttgtcgtcatcgtc

SEQ ID NO: 117 - DNA, 60 bp, synthetic construct
  misc_feature 1..60: note = Description of sequence: Primer
  source 1..60: mol_type = other DNA
cgaggtgcttcgttacagacgcggaccacgacgaggcagcaggtacttgtcgtcatcgtc

SEQ ID NO: 118 - DNA, 57 bp, synthetic construct
  misc_feature 1..57: note = Description of sequence: Primer
  source 1..57: mol_type = other DNA
cgaggtgcttcgttacagggtccaccagttctgctgcaggtacttgtcgtcatcgtc

SEQ ID NO: 119 - DNA, 60 bp, synthetic construct
  misc_feature 1..60: note = Description of sequence: Primer
  source 1..60: mol_type = other DNA
cgaggtgcttcgttaaacagcgttgatacccagagcaaccaggtacttgtcgtcatcgtc

SEQ ID NO: 120 - DNA, 60 bp, synthetic construct
  misc_feature 1..60: note = Description of sequence: Primer
  source 1..60: mol_type = other DNA
cgaggtgcttcgttaaacagcgttaacacccagagcaaccaggtacttgtcgtcatcgtc

SEQ ID NO: 121 - DNA, 57 bp, synthetic construct
  misc_feature 1..57: note = Description of sequence: Primer
  source 1..57: mol_type = other DNA
cgaggtgcttcgttaaacctgagacatggtgccatccatatacttgtcgtcatcgtc

SEQ ID NO: 122 - DNA, 60 bp, synthetic construct
  misc_feature 1..60: note = Description of sequence: Primer
  source 1..60: mol_type = other DNA
cgaggtgcttcgttaggtggtttccggctgcaggtccagcatgtacttgtcgtcatcgtc

SEQ ID NO: 123 - DNA, 57 bp, synthetic construct
  misc_feature 1..57: note = Description of sequence: Primer
  source 1..57: mol_type = other DNA
cgaggtgcttcgttaaacaacaatcaggtggtccagaacatacttgtcgtcatcgtc

SEQ ID NO: 124 - DNA, 57 bp, synthetic construct
  misc_feature 1..57: note = Description of sequence: Primer
  source 1..57: mol_type = other DNA
cgaggtgcttcgttaaacagaaacatccaggtagatcaggaacttgtcgtcatcgtc

SEQ ID NO: 125 - DNA, 57 bp, synthetic construct
  misc_feature 1..57: note = Description of sequence: Primer
  source 1..57: mol_type = other DNA
cgaggtgcttcgttacaggtgcaggtcaaagtccggcatgaacttgtcgtcatcgtc

SEQ ID NO: 126 - DNA, 60 bp, synthetic construct
  misc_feature 1..60: note = Description of sequence: Primer
  source 1..60: mol_type = other DNA
cgaggtgcttcgttaaacaccgaacagtttaacacccagcagaaccttgtcgtcatcgtc

SEQ ID NO: 127 - DNA, 57 bp, synthetic construct
  misc_feature 1..57: note = Description of sequence: Primer
  source 1..57: mol_type = other DNA
cgaggtgcttcgttacaggtaggtgttgtggtggatcagagccttgtcgtcatcgtc

SEQ ID NO: 128 - DNA, 60 bp, synthetic construct
  misc_feature 1..60: note = Description of sequence: Primer
  source 1..60: mol_type = other DNA
cgaggtgcttcgttaaaccaggaagatggtgaagttttccagaaccttgtcgtcatcgtc

SEQ ID NO: 129 - DNA, 60 bp, synthetic construct
  misc_feature 1..60: note = Description of sequence: Primer
  source 1..60: mol_type = other DNA
cgaggtgcttcgttacaggaagatggtgaagttttccagaacagacttgtcgtcatcgtc

SEQ ID NO: 130 - DNA, 57 bp, synthetic construct
  misc_feature 1..57: note = Description of sequence: Primer
  source 1..57: mol_type = other DNA
cgaggtgcttcgttaaacttcgtagttcaggccggtcaggatcttgtcgtcatcgtc

SEQ ID NO: 131 - DNA, 57 bp, synthetic construct
  misc_feature 1..57: note = Description of sequence: Primer
  source 1..57: mol_type = other DNA
cgaggtgcttcgttacagaaccggaacaaaaccgtacagagccttgtcgtcatcgtc

SEQ ID NO: 132 - DNA, 57 bp, synthetic construct
  misc_feature 1..57: note = Description of sequence: Primer
  source 1..57: mol_type = other DNA
cgaggtgcttcgttaaaccggcggagcccaagacataacaaccttgtcgtcatcgtc

SEQ ID NO: 133 - DNA, 60 bp, synthetic construct
  misc_feature 1..60: note = Description of sequence: Primer
  source 1..60: mol_type = other DNA
cgaggtgcttcgttacagcagcagagacggggtttccagcagagccttgtcgtcatcgtc

SEQ ID NO: 134 - DNA, 57 bp, synthetic construct
  misc_feature 1..57: note = Description of sequence: Primer
  source 1..57: mol_type = other DNA
cgaggtgcttcgttagatgtgcgggataaccggagacagagccttgtcgtcatcgtc

SEQ ID NO: 135 - DNA, 60 bp, synthetic construct
  misc_feature 1..60: note = Description of sequence: Primer
  source 1..60: mol_type = other DNA
cgaggtgcttcgttaaacaccgtaaaccaggaattcaaacagtttcttgtcgtcatcgtc

SEQ ID NO: 136 - DNA, 57 bp, synthetic construct
  misc_feature 1..57: note = Description of sequence: Primer
  source 1..57: mol_type = other DNA
cgaggtgcttcgttaaaccggaacagagcagcaattcaggttcttgtcgtcatcgtc

SEQ ID NO: 137 - DNA, 57 bp, synthetic construct
  misc_feature 1..57: note = Description of sequence: Primer
  source 1..57: mol_type = other DNA
cgaggtgcttcgttagatcaggtggatgaacgggataatcagcttgtcgtcatcgtc

SEQ ID NO: 138 - DNA, 57 bp, synthetic construct
  misc_feature 1..57: note = Description of sequence: Primer
  source 1..57: mol_type = other DNA
cgaggtgcttcgttacagacacggcggcataccaaacagcagcttgtcgtcatcgtc

SEQ ID NO: 139 - DNA, 57 bp, synthetic construct
  misc_feature 1..57: note = Description of sequence: Primer
  source 1..57: mol_type = other DNA
cgaggtgcttcgttacagcagaaccagttgatgagacagtttcttgtcgtcatcgtc

SEQ ID NO: 140 - DNA, 57 bp, synthetic construct
  misc_feature 1..57: note = Description of sequence: Primer
  source 1..57: mol_type = other DNA
cgaggtgcttcgttaaacagagtaaacgtaagaaccaacagccttgtcgtcatcgtc

SEQ ID NO: 141 - DNA, 57 bp, synthetic construct
  misc_feature 1..57: note = Description of sequence: Primer
  source 1..57: mol_type = other DNA
cgaggtgcttcgttaaacacgggtcagcaggttatacaggaacttgtcgtcatcgtc

SEQ ID NO: 142 - DNA, 57 bp, synthetic construct
  misc_feature 1..57: note = Description of sequence: Primer
  source 1..57: mol_type = other DNA
cgaggtgcttcgttacagtttctgctggatgttcatcagtttcttgtcgtcatcgtc

SEQ ID NO: 143 - DNA, 57 bp, synthetic construct
  misc_feature 1..57: note = Description of sequence: Primer
  source 1..57: mol_type = other DNA
cgaggtgcttcgttacagcggaaacagttgttcacccagcatcttgtcgtcatcgtc

SEQ ID NO: 144 - DNA, 57 bp, synthetic construct
  misc_feature 1..57: note = Description of sequence: Primer
  source 1..57: mol_type = other DNA
cgaggtgcttcgttaaacagaaacgtccaggtaggtcaggaacttgtcgtcatcgtc

SEQ ID NO: 145 - DNA, 57 bp, synthetic construct
  misc_feature 1..57: note = Description of sequence: Primer
  source 1..57: mol_type = other DNA
cgaggtgcttcgttacaggtgcaggtcgaagtccggcatagacttgtcgtcatcgtc

SEQ ID NO: 146 - DNA, 60 bp, synthetic construct
  misc_feature 1..60: note = Description of sequence: Primer
  source 1..60: mol_type = other DNA
cgaggtgcttcgttacacaccagacagtttcacacccagcagaaccttgtcgtcatcgtc

SEQ ID NO: 147 - DNA, 57 bp, synthetic construct
  misc_feature 1..57: note = Description of sequence: Primer
  source 1..57: mol_type = other DNA
cgaggtgcttcgttacaggtgggtgttgtggtggatcagagccttgtcgtcatcgtc

SEQ ID NO: 148 - DNA, 60 bp, synthetic construct
  misc_feature 1..60: note = Description of sequence: Primer
  source 1..60: mol_type = other DNA
cgaggtgcttcgttaaaccagcaggatggtgaagttttccagaaccttgtcgtcatcgtc

SEQ ID NO: 149 - DNA, 60 bp, synthetic construct
  misc_feature 1..60: note = Description of sequence: Primer
  source 1..60: mol_type = other DNA
cgaggtgcttcgttacagcaggatggtgaagttttccagaacagacttgtcgtcatcgtc

SEQ ID NO: 150 - DNA, 57 bp, synthetic construct
  misc_feature 1..57: note = Description of sequence: Primer
  source 1..57: mol_type = other DNA
cgaggtgcttcgttatgcttcgtagttcagaccagtcaggatcttgtcgtcatcgtc

SEQ ID NO: 151 - DNA, 57 bp, synthetic construct
  misc_feature 1..57: note = Description of sequence: Primer
  source 1..57: mol_type = other DNA
cgaggtgcttcgttacagaaccggaacagaaccgtacagagccttgtcgtcatcgtc

SEQ ID NO: 152 - DNA, 57 bp, synthetic construct
  misc_feature 1..57: note = Description of sequence: Primer
  source 1..57: mol_type = other DNA
cgaggtgcttcgttaaaccggcggagcccaagacagaacaaccttgtcgtcatcgtc

SEQ ID NO: 153 - DNA, 60 bp, synthetic construct
  misc_feature 1..60: note = Description of sequence: Primer
  source 1..60: mol_type = other DNA
cgaggtgcttcgttacagcagcagagacagggtttccagcagagccttgtcgtcatcgtc

SEQ ID NO: 154 - DNA, 57 bp, synthetic construct
  misc_feature 1..57: note = Description of sequence: Primer
  source 1..57: mol_type = other DNA
cgaggtgcttcgttagatcagcgggataaccggagacagagccttgtcgtcatcgtc

SEQ ID NO: 155 - DNA, 60 bp, synthetic construct
  misc_feature 1..60: note = Description of sequence: Primer
  source 1..60: mol_type = other DNA
cgaggtgcttcgttacacaccgtgaaccaggaactcgaacagtttcttgtcgtcatcgtc

SEQ ID NO: 156 - DNA, 57 bp, synthetic construct
  misc_feature 1..57: note = Description of sequence: Primer
  source 1..57: mol_type = other DNA
cgaggtgcttcgttaaaccggaacagagcaacggttcaggttcttgtcgtcatcgtc

SEQ ID NO: 157 - DNA, 57 bp, synthetic construct
  misc_feature 1..57: note = Description of sequence: Primer
  source 1..57: mol_type = other DNA
cgaggtgcttcgttagatcaggtggatgcacgggataatcagcttgtcgtcatcgtc

SEQ ID NO: 158 - DNA, 57 bp, synthetic construct
  misc_feature 1..57: note = Description of sequence: Primer
  source 1..57: mol_type = other DNA
cgaggtgcttcgttacaggcacggggtcataccgaacagcagcttgtcgtcatcgtc

SEQ ID NO: 159 - DNA, 57 bp, synthetic construct
  misc_feature 1..57: note = Description of sequence: Primer
  source 1..57: mol_type = other DNA
cgaggtgcttcgttacagcagaaccggctggtgagacagtttcttgtcgtcatcgtc

SEQ ID NO: 160 - DNA, 57 bp, synthetic construct
  misc_feature 1..57: note = Description of sequence: Primer
  source 1..57: mol_type = other DNA
cgaggtgcttcgttaaacagagtaaacgtgagaaccaacagccttgtcgtcatcgtc

SEQ ID NO: 161 - DNA, 57 bp, synthetic construct
  misc_feature 1..57: note = Description of sequence: Primer
  source 1..57: mol_type = other DNA
cgaggtgcttcgttaaacacgggtcagcgggttatacaggaacttgtcgtcatcgtc

SEQ ID NO: 162 - DNA, 57 bp, synthetic construct
  misc_feature 1..57: note = Description of sequence: Primer
  source 1..57: mol_type = other DNA
cgaggtgcttcgttacagttgctgctggatgttcatcagtttcttgtcgtcatcgtc

SEQ ID NO: 163 - DNA, 57 bp, synthetic construct
  misc_feature 1..57: note = Description of sequence: Primer
  source 1..57: mol_type = other DNA
cgaggtgcttcgttacagcgggaacagacgttcacccagcatcttgtcgtcatcgtc

SEQ ID NO: 164 - DNA, 57 bp, synthetic construct
  misc_feature 1..57: note = Description of sequence: Primer
  source 1..57: mol_type = other DNA
cgaggtgcttcgttacaggaagtgaaccagttcagcaactttcttgtcgtcatcgtc

SEQ ID NO: 165 - DNA, 57 bp, synthetic construct
  misc_feature 1..57: note = Description of sequence: Primer
  source 1..57: mol_type = other DNA
cgaggtgcttcgttacaggaagtgaaccagttcagccattttcttgtcgtcatcgtc

SEQ ID NO: 166 - DNA, 57 bp, synthetic construct
  misc_feature 1..57: note = Description of sequence: Primer
  source 1..57: mol_type = other DNA
cgaggtgcttcgttacaggaagtgaaccagttcaaccattttcttgtcgtcatcgtc

SEQ ID NO: 167 - DNA, 57 bp, synthetic construct
  misc_feature 1..57: note = Description of sequence: Primer
  source 1..57: mol_type = other DNA
cgaggtgcttcgttacaggaagtgaaccagtttagcaactttcttgtcgtcatcgtc

SEQ ID NO: 168 - DNA, 57 bp, synthetic construct
  misc_feature 1..57: note = Description of sequence: Primer
  source 1..57: mol_type = other DNA
cgaggtgcttcgttaggtgaaacgcacaaatgcaaacaggcgcttgtcgtcatcgtc

SEQ ID NO: 169 - DNA, 57 bp, synthetic construct
  misc_feature 1..57: note = Description of sequence: Primer
  source 1..57: mol_type = other DNA
cgaggtgcttcgttaggtgttacggatcagttcatccaggtacttgtcgtcatcgtc

SEQ ID NO: 170 - DNA, 57 bp, synthetic construct
  misc_feature 1..57: note = Description of sequence: Primer
  source 1..57: mol_type = other DNA
cgaggtgcttcgttaaacttcgttaccacggaattgcaggaacttgtcgtcatcgtc

SEQ ID NO: 171 - DNA, 57 bp, synthetic construct
  misc_feature 1..57: note = Description of sequence: Primer
  source 1..57: mol_type = other DNA
cgaggtgcttcgttaaactttttcttcaatatcggtcaggatcttgtcgtcatcgtc

SEQ ID NO: 172 - DNA, 57 bp, synthetic construct
  misc_feature 1..57: note = Description of sequence: Primer
  source 1..57: mol_type = other DNA
cgaggtgcttcgttacaggtgcaggtcaaaatccggcatgaacttgtcgtcatcgtc

SEQ ID NO: 173 - DNA, 57 bp, synthetic construct
  misc_feature 1..57: note = Description of sequence: Primer
  source 1..57: mol_type = other DNA
cgaggtgcttcgttacagcttctgttggatgttcatcagtttcttgtcgtcatcgtc

SEQ ID NO: 174 - DNA, 57 bp, synthetic construct
  misc_feature 1..57: note = Description of sequence: Primer
  source 1..57: mol_type = other DNA
cgaggtgcttcgttaaacaggtttgtcaaccggaaacatacccttgtcgtcatcgtc

SEQ ID NO: 175 - DNA, 57 bp, synthetic construct
  misc_feature 1..57: note = Description of sequence: Primer
  source 1..57: mol_type = other DNA
cgaggtgcttcgttaaaccggaaacatacccagatactgaaccttgtcgtcatcgtc

SEQ ID NO: 176 - DNA, 57 bp, synthetic construct
  misc_feature 1..57: note = Description of sequence: Primer
  source 1..57: mol_type = other DNA
cgaggtgcttcgttacagttcatattccacatgcggtaaccacttgtcgtcatcgtc

SEQ ID NO: 177 - DNA, 57 bp, synthetic construct
  misc_feature 1..57: note = Description of sequence: Primer
  source 1..57: mol_type = other DNA
cgaggtgcttcgttaaacgtgcaacggagatgcccacagtttcttgtcgtcatcgtc

SEQ ID NO: 178 - DNA, 57 bp, synthetic construct
  misc_feature 1..57: note = Description of sequence: Primer
  source 1..57: mol_type = other DNA
cgaggtgcttcgttacagggtgaagatgtccacattcaggatcttgtcgtcatcgtc

SEQ ID NO: 179 - DNA, 57 bp, synthetic construct
  misc_feature 1..57: note = Description of sequence: Primer
  source 1..57: mol_type = other DNA
cgaggtgcttcgttacaggtgggtaatgaaaacgtaaacaaacttgtcgtcatcgtc

SEQ ID NO: 180 - DNA, 57 bp, synthetic construct
  misc_feature 1..57: note = Description of sequence: Primer
  source 1..57: mol_type = other DNA
cgaggtgcttcgttaaatacgtgcctgggtcagcagcatgaacttgtcgtcatcgtc

SEQ ID NO: 181 - DNA, 60 bp, synthetic construct
  misc_feature 1..60: note = Description of sequence: Primer
  source 1..60: mol_type = other DNA
cgaggtgcttcgttacacacgtactaaggccagaattgacagcatcttgtcgtcatcgtc

SEQ ID NO: 182 - DNA, 57 bp, synthetic construct
  misc_feature 1..57: note = Description of sequence: Primer
  source 1..57: mol_type = other DNA
cgaggtgcttcgttaaacttctgccggggtgtaagacagagccttgtcgtcatcgtc

SEQ ID NO: 183 - DNA, 60 bp, synthetic construct
  misc_feature 1..60: note = Description of sequence: Primer
  source 1..60: mol_type = other DNA
cgaggtgcttcgttagatcagacccaggtcaccgtccatcagatgcttgtcgtcatcgtc

SEQ ID NO: 184 - DNA, 57 bp, synthetic construct
  misc_feature 1..57: note = Description of sequence: Primer
  source 1..57: mol_type = other DNA
cgaggtgcttcgttacagacccaggtcaccgtccatcagatgcttgtcgtcatcgtc

SEQ ID NO: 185 - DNA, 57 bp, synthetic construct
  misc_feature 1..57: note = Description of sequence: Primer
  source 1..57: mol_type = other DNA
cgaggtgcttcgttacagagacggagaatgcggaaccatcagcttgtcgtcatcgtc

SEQ ID NO: 186 - DNA, 57 bp, synthetic construct
  misc_feature 1..57: note = Description of sequence: Primer
  source 1..57: mol_type = other DNA
cgaggtgcttcgttatgcgttcagaatttgctcaaacagtttcttgtcgtcatcgtc

SEQ ID NO: 187 - DNA, 57 bp, synthetic construct
  misc_feature 1..57: note = Description of sequence: Primer
  source 1..57: mol_type = other DNA
cgaggtgcttcgttacagtttggtgtgcagggtcagcatgtacttgtcgtcatcgtc

SEQ ID NO: 188 - DNA, 57 bp, synthetic construct
  misc_feature 1..57: note = Description of sequence: Primer
  source 1..57: mol_type = other DNA
cgaggtgcttcgttaaatcgcaatgaaaaaagaggtcagacccttgtcgtcatcgtc

SEQ ID NO: 189 - DNA, 57 bp, synthetic construct
  misc_feature 1..57: note = Description of sequence: Primer
  source 1..57: mol_type = other DNA
cgaggtgcttcgttaaaccaggtacaggtggtcagacagaaacttgtcgtcatcgtc

SEQ ID NO: 190 - DNA, 57 bp, synthetic construct
  misc_feature 1..57: note = Description of sequence: Primer
  source 1..57: mol_type = other DNA
cgaggtgcttcgttacagaccagagaagatagccagcaggtacttgtcgtcatcgtc

SEQ ID NO: 191 - DNA, 57 bp, synthetic construct
  misc_feature 1..57: note = Description of sequence: Primer
  source 1..57: mol_type = other DNA
cgaggtgcttcgttaaacaactgcggtgatggtgttcagtttcttgtcgtcatcgtc

SEQ ID NO: 192 - DNA, 57 bp, synthetic construct
  misc_feature 1..57: note = Description of sequence: Primer
  source 1..57: mol_type = other DNA
cgaggtgcttcgttacagaccgtgagcgtcgtccaccagcatcttgtcgtcatcgtc

SEQ ID NO: 193 - DNA, 57 bp, synthetic construct
  misc_feature 1..57: note = Description of sequence: Primer
  source 1..57: mol_type = other DNA
cgaggtgcttcgttatgcaacaataacagccagcatcagcatcttgtcgtcatcgtc

SEQ ID NO: 194 - DNA, 57 bp, synthetic construct
  misc_feature 1..57: note = Description of sequence: Primer
  source 1..57: mol_type = other DNA
cgaggtgcttcgttacacaaccgccagcgtacctgctaacagcttgtcgtcatcgtc

SEQ ID NO: 195 - DNA, 57 bp, synthetic construct
  misc_feature 1..57: note = Description of sequence: Primer
  source 1..57: mol_type = other DNA
cgaggtgcttcgttaaacacgaggagacagcggagccagagacttgtcgtcatcgtc

SEQ ID NO: 196 - DNA, 60 bp, synthetic construct
  misc_feature 1..60: note = Description of sequence: Primer
  source 1..60: mol_type = other DNA
cgaggtgcttcgttaaacgccgaacagtttcacacccagcagaaccttgtcgtcatcgtc

SEQ ID NO: 197 - DNA, 57 bp, synthetic construct
  misc_feature 1..57: note = Description of sequence: Primer
  source 1..57: mol_type = other DNA
cgaggtgcttcgttaaaccgtaccaaccatcgtaaacagcgtcttgtcgtcatcgtc

SEQ ID NO: 198 - DNA, 57 bp, synthetic construct
  misc_feature 1..57: note = Description of sequence: Primer
  source 1..57: mol_type = other DNA
cgaggtgcttcgttaaacattcggcacggtcatagccagcagcttgtcgtcatcgtc

SEQ ID NO: 199 - DNA, 57 bp, synthetic construct
  misc_feature 1..57: note = Description of sequence: Primer
  source 1..57: mol_type = other DNA
cgaggtgcttcgttacacattcggaactttaattgccagtaacttgtcgtcatcgtc

SEQ ID NO: 200 - DNA, 60 bp, synthetic construct
  misc_feature 1..60: note = Description of sequence: Primer
  source 1..60: mol_type = other DNA
cgaggtgcttcgttaaacttccaggtcgttgattttggtcataaacttgtcgtcatcgtc

SEQ ID NO: 201 - DNA, 57 bp, synthetic construct
  misc_feature 1..57: note = Description of sequence: Primer
  source 1..57: mol_type = other DNA
cgaggtgcttcgttacagaacagacagcagatcgttcaggaacttgtcgtcatcgtc

SEQ ID NO: 202 - DNA, 57 bp, synthetic construct
  misc_feature 1..57: note = Description of sequence: Primer
  source 1..57: mol_type = other DNA
cgaggtgcttcgttaaatgaaccatgcaataaccatcagacccttgtcgtcatcgtc

SEQ ID NO: 203 - DNA, 57 bp, synthetic construct
  misc_feature 1..57: note = Description of sequence: Primer
  source 1..57: mol_type = other DNA
cgaggtgcttcgttaaacagcaacaacataagaaaagatgaacttgtcgtcatcgtc

SEQ ID NO: 204 - DNA, 57 bp, synthetic construct
  misc_feature 1..57: note = Description of sequence: Primer
  source 1..57: mol_type = other DNA
cgaggtgcttcgttacagataggtgttgtggtggatcagagccttgtcgtcatcgtc

SEQ ID NO: 205 - DNA, 57 bp, synthetic construct
  misc_feature 1..57: note = Description of sequence: Primer
  source 1..57: mol_type = other DNA
cgaggtgcttcgttagatattagcagcccagtccagcagaatcttgtcgtcatcgtc

SEQ ID NO: 206 - DNA, 57 bp, synthetic construct
  misc_feature 1..57: note = Description of sequence: Primer
  source 1..57: mol_type = other DNA
cgaggtgcttcgttaaaccggagacagttcagagaacagactcttgtcgtcatcgtc

SEQ ID NO: 207 - DNA, 57 bp, synthetic construct
  misc_feature 1..57: note = Description of sequence: Primer
  source 1..57: mol_type = other DNA
cgaggtgcttcgttacagttcggtgtagtattccagaacagacttgtcgtcatcgtc

SEQ ID NO: 208 - DNA, 57 bp, synthetic construct
  misc_feature 1..57: note = Description of sequence: Primer
  source 1..57: mol_type = other DNA
cgaggtgcttcgttaaacttcaaacagagatttcgcaatatgcttgtcgtcatcgtc

SEQ ID NO: 209 - DNA, 57 bp, synthetic construct
  misc_feature 1..57: note = Description of sequence: Primer
  source 1..57: mol_type = other DNA
cgaggtgcttcgttaaaccggcggagcccaactcataacaaccttgtcgtcatcgtc

SEQ ID NO: 210 - DNA, 57 bp, synthetic construct
  misc_feature 1..57: note = Description of sequence: Primer
  source 1..57: mol_type = other DNA
cgaggtgcttcgttaaacggtcacaaaaatatccattgcggtcttgtcgtcatcgtc

SEQ ID NO: 211 - DNA, 57 bp, synthetic construct
  misc_feature 1..57: note = Description of sequence: Primer
  source 1..57: mol_type = other DNA
cgaggtgcttcgttaaacaaaaatgtccatagcggtaacatacttgtcgtcatcgtc

SEQ ID NO: 212 - DNA, 57 bp, synthetic construct
  misc_feature 1..57: note = Description of sequence: Primer
  source 1..57: mol_type = other DNA
cgaggtgcttcgttatgcgccaacaatccaggtcagaacgtacttgtcgtcatcgtc

SEQ ID NO: 213 - DNA, 57 bp, synthetic construct
  misc_feature 1..57: note = Description of sequence: Primer
  source 1..57: mol_type = other DNA
cgaggtgcttcgttacagaaccggaacaaaaccatacagtgccttgtcgtcatcgtc

SEQ ID NO: 214 - DNA, 60 bp, synthetic construct
  misc_feature 1..60: note = Description of sequence: Primer
  source 1..60: mol_type = other DNA
cgaggtgcttcgttacagtaacagagacggggtttccagcagtgccttgtcgtcatcgtc

SEQ ID NO: 215 - DNA, 57 bp, synthetic construct
  misc_feature 1..57: note = Description of sequence: Primer
  source 1..57: mol_type = other DNA
cgaggtgcttcgttacagcagagacggggtttccagcagtgccttgtcgtcatcgtc

SEQ ID NO: 216 - DNA, 57 bp, synthetic construct
  misc_feature 1..57: note = Description of sequence: Primer
  source 1..57: mol_type = other DNA
cgaggtgcttcgttagatccagtacagcatattgaagatcagcttgtcgtcatcgtc

SEQ ID NO: 217 - DNA, 57 bp, synthetic construct
  misc_feature 1..57: note = Description of sequence: Primer
  source 1..57: mol_type = other DNA
cgaggtgcttcgttaaaccggagaggtggtcaggtccagagacttgtcgtcatcgtc

SEQ ID NO: 218 - DNA, 57 bp, synthetic construct
  misc_feature 1..57: note = Description of sequence: Primer
  source 1..57: mol_type = other DNA
cgaggtgcttcgttacaggtagatgttagccagcggcattttcttgtcgtcatcgtc

SEQ ID NO: 219 - DNA, 57 bp, synthetic construct
  misc_feature 1..57: note = Description of sequence: Primer
  source 1..57: mol_type = other DNA
cgaggtgcttcgttaaaccaggaagtccagagagaaagagaacttgtcgtcatcgtc

SEQ ID NO: 220 - DNA, 57 bp, synthetic construct
  misc_feature 1..57: note = Description of sequence: Primer
  source 1..57: mol_type = other DNA
cgaggtgcttcgttacagcttcacggtgtacttttgcagaaacttgtcgtcatcgtc

SEQ ID NO: 221 - DNA, 57 bp, synthetic construct
  misc_feature 1..57: note = Description of sequence: Primer
  source 1..57: mol_type = other DNA
cgaggtgcttcgttagatttttgcgatcatagcgttcaggatcttgtcgtcatcgtc

SEQ ID NO: 222 - DNA, 57 bp, synthetic construct
  misc_feature 1..57: note = Description of sequence: Primer
  source 1..57: mol_type = other DNA
cgaggtgcttcgttagatgtaggtgtgcagttcagacagtttcttgtcgtcatcgtc

SEQ ID NO: 223 - DNA, 57 bp, synthetic construct
  misc_feature 1..57: note = Description of sequence: Primer
  source 1..57: mol_type = other DNA
cgaggtgcttcgttaaacgctaacagacagtaacagcagagacttgtcgtcatcgtc

SEQ ID NO: 224 - DNA, 57 bp, synthetic construct
  misc_feature 1..57: note = Description of sequence: Primer
  source 1..57: mol_type = other DNA
cgaggtgcttcgttacagggtcacggtcagttcggccatatacttgtcgtcatcgtc

SEQ ID NO: 225 - DNA, 57 bp, synthetic construct
  misc_feature 1..57: note = Description of sequence: Primer
  source 1..57: mol_type = other DNA
cgaggtgcttcgttacagttcacccggagagtcatacatatacttgtcgtcatcgtc

SEQ ID NO: 226 - DNA, 60 bp, synthetic construct
  misc_feature 1..60: note = Description of sequence: Primer
  source 1..60: mol_type = other DNA
cgaggtgcttcgttaaacaatgtaaacaatagagaacggcatcatcttgtcgtcatcgtc

SEQ ID NO: 227 - DNA, 57 bp, synthetic construct
  misc_feature 1..57: note = Description of sequence: Primer
  source 1..57: mol_type = other DNA
cgaggtgcttcgttaaatgtaaacaatagagaacggcatcatcttgtcgtcatcgtc

SEQ ID NO: 228 - DNA, 60 bp, synthetic construct
  misc_feature 1..60: note = Description of sequence: Primer
  source 1..60: mol_type = other DNA
cgaggtgcttcgttagatgtaaacaatagagaacggcatcatcagcttgtcgtcatcgtc

SEQ ID NO: 229 - DNA, 60 bp, synthetic construct
  misc_feature 1..60: note = Description of sequence: Primer
  source 1..60: mol_type = other DNA
cgaggtgcttcgttacaggtagaacaggtgagagaaactcatggtcttgtcgtcatcgtc

SEQ ID NO: 230 - DNA, 57 bp, synthetic construct
  misc_feature 1..57: note = Description of sequence: Primer
  source 1..57: mol_type = other DNA
cgaggtgcttcgttacagcaggatagaaatgcccataatgaacttgtcgtcatcgtc

SEQ ID NO: 231 - DNA, 57 bp, synthetic construct
  misc_feature 1..57: note = Description of sequence: Primer
  source 1..57: mol_type = other DNA
cgaggtgcttcgttaaaccaggaatgcacggtgaaacagaaccttgtcgtcatcgtc

SEQ ID NO: 232 - DNA, 57 bp, synthetic construct
  misc_feature 1..57: note = Description of sequence: Primer
  source 1..57: mol_type = other DNA
cgaggtgcttcgttaaaccaggttcagaacatcagaagaaaacttgtcgtcatcgtc

SEQ ID NO: 233 - DNA, 57 bp, synthetic construct
  misc_feature 1..57: note = Description of sequence: Primer
  source 1..57: mol_type = other DNA
cgaggtgcttcgttacagaaactccagatacggaaccagacgcttgtcgtcatcgtc

SEQ ID NO: 234 - DNA, 57 bp, synthetic construct
  misc_feature 1..57: note = Description of sequence: Primer
  source 1..57: mol_type = other DNA
cgaggtgcttcgttaaaccggcttgatctcacgagacagtttcttgtcgtcatcgtc

SEQ ID NO: 235 - DNA, 57 bp, synthetic construct
  misc_feature 1..57: note = Description of sequence: Primer
  source 1..57: mol_type = other DNA
cgaggtgcttcgttaaacatagtaggttaagattgccagcagcttgtcgtcatcgtc

SEQ ID NO: 236 - DNA, 57 bp, synthetic construct
  misc_feature 1..57: note = Description of sequence: Primer
  source 1..57: mol_type = other DNA
cgaggtgcttcgttaagcgttcacgttcagatccggcagaaacttgtcgtcatcgtc

SEQ ID NO: 237 - DNA, 57 bp, synthetic construct
  misc_feature 1..57: note = Description of sequence: Primer
  source 1..57: mol_type = other DNA
cgaggtgcttcgttagatcggagacaggatttcagaggtgtacttgtcgtcatcgtc

SEQ ID NO: 238 - DNA, 57 bp, synthetic construct
  misc_feature 1..57: note = Description of sequence: Primer
  source 1..57: mol_type = other DNA
cgaggtgcttcgttacagagccagatagcgattaaacaggttcttgtcgtcatcgtc

SEQ ID NO: 239 - DNA, 60 bp, synthetic construct
  misc_feature 1..60: note = Description of sequence: Primer
  source 1..60: mol_type = other DNA
cgaggtgcttcgttacagcagccaggtaactgatgcgatcagcagcttgtcgtcatcgtc

SEQ ID NO: 240 - DNA, 57 bp, synthetic construct
  misc_feature 1..57: note = Description of sequence: Primer
  source 1..57: mol_type = other DNA
cgaggtgcttcgttacagccaggtaacagatgcgatcagcagcttgtcgtcatcgtc

SEQ ID NO: 241 - DNA, 57 bp, synthetic construct
  misc_feature 1..57: note = Description of sequence: Primer
  source 1..57: mol_type = other DNA
cgaggtgcttcgttaaacgccttccataaattcgtccaggaacttgtcgtcatcgtc

SEQ ID NO: 242 - DNA, 57 bp, synthetic construct
  misc_feature 1..57: note = Description of sequence: Primer
  source 1..57: mol_type = other DNA
cgaggtgcttcgttagatatgcgggataaccggagacagagccttgtcgtcatcgtc

SEQ ID NO: 243 - DNA, 57 bp, synthetic construct
  misc_feature 1..57: note = Description of sequence: Primer
  source 1..57: mol_type = other DNA
cgaggtgcttcgttaagccagttgaaccggaggccataaatacttgtcgtcatcgtc

SEQ ID NO: 244 - DNA, 57 bp, synthetic construct
  misc_feature 1..57: note = Description of sequence: Primer
  source 1..57: mol_type = other DNA
cgaggtgcttcgttaaacaacacgtaacggctcccataaccacttgtcgtcatcgtc

SEQ ID NO: 245 - DNA, 60 bp, synthetic construct
  misc_feature 1..60: note = Description of sequence: Primer
  source 1..60: mol_type = other DNA
cgaggtgcttcgttacagcagacacggcggcataccaaacagcagcttgtcgtcatcgtc

SEQ ID NO: 246 - DNA, 57 bp, synthetic construct
  misc_feature 1..57: note = Description of sequence: Primer
  source 1..57: mol_type = other DNA
cgaggtgcttcgttacagacacggcggcataccgaacagcagcttgtcgtcatcgtc

SEQ ID NO: 247 - DNA, 57 bp, synthetic construct
  misc_feature 1..57: note = Description of sequence: Primer
  source 1..57: mol_type = other DNA
cgaggtgcttcgttacagtttcgcaatggtttcattcagacccttgtcgtcatcgtc

SEQ ID NO: 248 - DNA, 57 bp, synthetic construct
  misc_feature 1..57: note = Description of sequence: Primer
  source 1..57: mol_type = other DNA
cgaggtgcttcgttaaacaggcggcggcataccaataaccagcttgtcgtcatcgtc

SEQ ID NO: 249 - DNA, 57 bp, synthetic construct
  misc_feature 1..57: note = Description of sequence: Primer
  source 1..57: mol_type = other DNA
cgaggtgcttcgttaaacttccgggcctttttcgtccagcagcttgtcgtcatcgtc

SEQ ID NO: 250 - DNA, 57 bp, synthetic construct
  misc_feature 1..57: note = Description of sequence: Primer
  source 1..57: mol_type = other DNA
cgaggtgcttcgttagatagaagagtaatactgataaatgaacttgtcgtcatcgtc

SEQ ID NO: 251 - DNA, 57 bp, synthetic construct
  misc_feature 1..57: note = Description of sequence: Primer
  source 1..57: mol_type = other DNA
cgaggtgcttcgttaaacttcgtagttcagacccgtcagaatcttgtcgtcatcgtc

SEQ ID NO: 252 - DNA, 57 bp, synthetic construct
  misc_feature 1..57: note = Description of sequence: Primer
  source 1..57: mol_type = other DNA
cgaggtgcttcgttacagggtcgggtcagcaggattcagaatcttgtcgtcatcgtc

SEQ ID NO: 253 - DNA, 57 bp, synthetic construct
  misc_feature 1..57: note = Description of sequence: Primer
  source 1..57: mol_type = other DNA
cgaggtgcttcgttacaggaaagggaacataacaatcaggatcttgtcgtcatcgtc

SEQ ID NO: 254 - DNA, 57 bp, synthetic construct
  misc_feature 1..57: note = Description of sequence: Primer
  source 1..57: mol_type = other DNA
cgaggtgcttcgttacatcagggtcagcaggtacagcatgaacttgtcgtcatcgtc

SEQ ID NO: 255 - DNA, 57 bp, synthetic construct
  misc_feature 1..57: note = Description of sequence: Primer
  source 1..57: mol_type = other DNA
cgaggtgcttcgttaaaccataaccaggtacatgaacaggaacttgtcgtcatcgtc

SEQ ID NO: 256 - DNA, 57 bp, synthetic construct
  misc_feature 1..57: note = Description of sequence: Primer
  source 1..57: mol_type = other DNA
cgaggtgcttcgttacagcagcgggaacagaacattcaggaacttgtcgtcatcgtc

SEQ ID NO: 257 - DNA, 57 bp, synthetic construct
  misc_feature 1..57: note = Description of sequence: Primer
  source 1..57: mol_type = other DNA
cgaggtgcttcgttacagtgccaggttttccagaaagatatacttgtcgtcatcgtc

SEQ ID NO: 258 - DNA, 57 bp, synthetic construct
  misc_feature 1..57: note = Description of sequence: Primer
  source 1..57: mol_type = other DNA
cgaggtgcttcgttaggtattatagaacacagcaaccattttcttgtcgtcatcgtc

SEQ ID NO: 259 - DNA, 57 bp, synthetic construct
  misc_feature 1..57: note = Description of sequence: Primer
  source 1..57: mol_type = other DNA
cgaggtgcttcgttacagcatgtagataaacggattcagaaccttgtcgtcatcgtc

SEQ ID NO: 260 - DNA, 57 bp, synthetic construct
  misc_feature 1..57: note = Description of sequence: Primer
  source 1..57: mol_type = other DNA
cgaggtgcttcgttaaacaaacacaaccagttcgttcagatacttgtcgtcatcgtc

SEQ ID NO: 261 - DNA, 60 bp, synthetic construct
  misc_feature 1..60: note = Description of sequence: Primer
  source 1..60: mol_type = other DNA
cgaggtgcttcgttaaacaacggtcacggtgtagatttccaggaacttgtcgtcatcgtc

SEQ ID NO: 262 - DNA, 57 bp, synthetic construct
  misc_feature 1..57: note = Description of sequence: Primer
  source 1..57: mol_type = other DNA
cgaggtgcttcgttaaacggtcacggtatagatttccaggaacttgtcgtcatcgtc

SEQ ID NO: 263 - DNA, 57 bp, synthetic construct
  misc_feature 1..57: note = Description of sequence: Primer
  source 1..57: mol_type = other DNA
cgaggtgcttcgttagatgaatgcgaaaaaggtgaacaggaacttgtcgtcatcgtc

SEQ ID NO: 264 - DNA, 57 bp, synthetic construct
  misc_feature 1..57: note = Description of sequence: Primer
  source 1..57: mol_type = other DNA
cgaggtgcttcgttagatagccagcagatagcagtcaatgaacttgtcgtcatcgtc

SEQ ID NO: 265 - DNA, 57 bp, synthetic construct
  misc_feature 1..57: note = Description of sequence: Primer
  source 1..57: mol_type = other DNA
cgaggtgcttcgttaaacgtgcggagaaccttgcagcagagacttgtcgtcatcgtc

SEQ ID NO: 266 - DNA, 57 bp, synthetic construct
  misc_feature 1..57: note = Description of sequence: Primer
  source 1..57: mol_type = other DNA
cgaggtgcttcgttacagcgggaacagttgttcacccagcatcttgtcgtcatcgtc

SEQ ID NO: 267 - DNA, 57 bp, synthetic construct
  misc_feature 1..57: note = Description of sequence: Primer
  source 1..57: mol_type = other DNA
cgaggtgcttcgttaaacaaacagcagaaccaggaacaggaacttgtcgtcatcgtc

SEQ ID NO: 268 - DNA, 57 bp, synthetic construct
  misc_feature 1..57: note = Description of sequence: Primer
  source 1..57: mol_type = other DNA
cgaggtgcttcgttaaacgcccataaccagcggaaaaaccagcttgtcgtcatcgtc

SEQ ID NO: 269 - DNA, 57 bp, synthetic construct
  misc_feature 1..57: note = Description of sequence: Primer
  source 1..57: mol_type = other DNA
cgaggtgcttcgttacagcggaaaaaccagatcatgcagacgcttgtcgtcatcgtc

SEQ ID NO: 270 - DNA, 57 bp, synthetic construct
  misc_feature 1..57: note = Description of sequence: Primer
  source 1..57: mol_type = other DNA
cgaggtgcttcgttaaacagagtaaacataagaaccaacagccttgtcgtcatcgtc

SEQ ID NO: 271 - DNA, 57 bp, synthetic construct
  misc_feature 1..57: note = Description of sequence: Primer
  source 1..57: mol_type = other DNA
cgaggtgcttcgttatgccggaaagaagataatgctcagcagcttgtcgtcatcgtc

SEQ ID NO: 272 - DNA, 57 bp, synthetic construct
  misc_feature 1..57: note = Description of sequence: Primer
  source 1..57: mol_type = other DNA
cgaggtgcttcgttacatgaaatgagagaaaacggtcaggaacttgtcgtcatcgtc

SEQ ID NO: 273 - DNA, 57 bp, synthetic construct
  misc_feature 1..57: note = Description of sequence: Primer
  source 1..57: mol_type = other DNA
cgaggtgcttcgttatgcagatgagaatgcagcgaacagtaacttgtcgtcatcgtc

SEQ ID NO: 274 - DNA, 57 bp, synthetic construct
  misc_feature 1..57: note = Description of sequence: Primer
  source 1..57: mol_type = other DNA
cgaggtgcttcgttacagaccccacagagaaaccagtaattgcttgtcgtcatcgtc

SEQ ID NO: 275 - DNA, 57 bp, synthetic construct
  misc_feature 1..57: note = Description of sequence: Primer
  source 1..57: mol_type = other DNA
cgaggtgcttcgttaaacttccacaaccacacccagttgatgcttgtcgtcatcgtc

SEQ ID NO: 276 - DNA, 57 bp, synthetic construct
  misc_feature 1..57: note = Description of sequence: Primer
  source 1..57: mol_type = other DNA
cgaggtgcttcgttaaacacgttgaacggcatccagaataaacttgtcgtcatcgtc

SEQ ID NO: 277 - DNA, 57 bp, synthetic construct
  misc_feature 1..57: note = Description of sequence: Primer
  source 1..57: mol_type = other DNA
cgaggtgcttcgttacagagagttatgatattcagacagtttcttgtcgtcatcgtc

SEQ ID NO: 278 - DNA, 60 bp, synthetic construct
  misc_feature 1..60: note = Description of sequence: Primer
  source 1..60: mol_type = other DNA
cgaggtgcttcgttaaatgaatttgaagttctggtctgctaacagcttgtcgtcatcgtc

SEQ ID NO: 279 - DNA, 57 bp, synthetic construct
  misc_feature 1..57: note = Description of sequence: Primer
  source 1..57: mol_type = other DNA
cgaggtgcttcgttacaggtacggtttgaaataattcagaaccttgtcgtcatcgtc

SEQ ID NO: 280 - DNA, 57 bp, synthetic construct
  misc_feature 1..57: note = Description of sequence: Primer
  source 1..57: mol_type = other DNA
cgaggtgcttcgttaaatagaagaaattgcgccaaccagagccttgtcgtcatcgtc

SEQ ID NO: 281 - DNA, 57 bp, synthetic construct
  misc_feature 1..57: note = Description of sequence: Primer
  source 1..57: mol_type = other DNA
cgaggtgcttcgttaaacacgggtcagcaggttatacagaaacttgtcgtcatcgtc

SEQ ID NO: 282 - DNA, 57 bp, synthetic construct
  misc_feature 1..57: note = Description of sequence: Primer
  source 1..57: mol_type = other DNA
cgaggtgcttcgttaaaccggggtactgatttcaacaatgtgcttgtcgtcatcgtc

SEQ ID NO: 283 - DNA, 57 bp, synthetic construct
  misc_feature 1..57: note = Description of sequence: Primer
  source 1..57: mol_type = other DNA
cgaggtgcttcgttaaacaatttcaacaccagccagcagtttcttgtcgtcatcgtc

SEQ ID NO: 284 - DNA, 60 bp, synthetic construct
  misc_feature 1..60: note = Description of sequence: Primer
  source 1..60: mol_type = other DNA
cgaggtgcttcgttaaacggtgtggacaacctgttcgcccagaatcttgtcgtcatcgtc

SEQ ID NO: 285 - DNA, 57 bp, synthetic construct
  misc_feature 1..57: note = Description of sequence: Primer
  source 1..57: mol_type = other DNA
cgaggtgcttcgttacagaaaaaccagtgaacccgccattgccttgtcgtcatcgtc

SEQ ID NO: 286 - DNA, 57 bp, synthetic construct
  misc_feature 1..57: note = Description of sequence: Primer
  source 1..57: mol_type = other DNA
cgaggtgcttcgttaagctgcaatgatggtggtcggcatgtacttgtcgtcatcgtc

SEQ ID NO: 287 - DNA, 57 bp, synthetic construct
  misc_feature 1..57: note = Description of sequence: Primer
  source 1..57: mol_type = other DNA
cgaggtgcttcgttacataccaaaaatctgtgcaaccaggatcttgtcgtcatcgtc

SEQ ID NO: 288 - DNA, 57 bp, synthetic construct
  misc_feature 1..57: note = Description of sequence: Primer
  source 1..57: mol_type = other DNA
cgaggtgcttcgttacagacccagaacttgcgtaatcagaatcttgtcgtcatcgtc

SEQ ID NO: 289 - DNA, 60 bp, synthetic construct
  misc_feature 1..60: note = Description of sequence: Primer
  source 1..60: mol_type = other DNA
cgaggtgcttcgttacagacccaggaacagagcagccaggatacgcttgtcgtcatcgtc

SEQ ID NO: 290 - DNA, 57 bp, synthetic construct
  misc_feature 1..57: note = Description of sequence: Primer
  source 1..57: mol_type = other DNA
cgaggtgcttcgttacagcagaaccgtccaagaacccagcagcttgtcgtcatcgtc

SEQ ID NO: 291 - DNA, 60 bp, synthetic construct
  misc_feature 1..60: note = Description of sequence: Primer
  source 1..60: mol_type = other DNA
cgaggtgcttcgttaaacgccgtaaaccaggaactcaaacagtttcttgtcgtcatcgtc

SEQ ID NO: 292 - DNA, 57 bp, synthetic construct
  misc_feature 1..57: note = Description of sequence: Primer
  source 1..57: mol_type = other DNA
cgaggtgcttcgttaggtgtacggcagcgggttagccagtttcttgtcgtcatcgtc

SEQ ID NO: 293 - DNA, 57 bp, synthetic construct
  misc_feature 1..57: note = Description of sequence: Primer
  source 1..57: mol_type = other DNA
cgaggtgcttcgttacagcagaaccagttggtgagacagtttcttgtcgtcatcgtc

SEQ ID NO: 294 - DNA, 57 bp, synthetic construct
  misc_feature 1..57: note = Description of sequence: Primer
  source 1..57: mol_type = other DNA
cgaggtgcttcgttacagaccgattgcttcgtccagcaggaacttgtcgtcatcgtc

SEQ ID NO: 295 - DNA, 57 bp, synthetic construct
  misc_feature 1..57: note = Description of sequence: Primer
  source 1..57: mol_type = other DNA
cgaggtgcttcgttaggtggtagccatagaatcttgcagatacttgtcgtcatcgtc

SEQ ID NO: 296 - DNA, 60 bp, synthetic construct
  misc_feature 1..60: note = Description of sequence: Primer
  source 1..60: mol_type = other DNA
cgaggtgcttcgttacaggaaagaagagatagatgccatcaggaacttgtcgtcatcgtc

SEQ ID NO: 297 - DNA, 57 bp, synthetic construct
  misc_feature 1..57: note = Description of sequence: Primer
  source 1..57: mol_type = other DNA
cgaggtgcttcgttagaaagaagagatagatgccatcaggaacttgtcgtcatcgtc

SEQ ID NO: 298 - DNA, 57 bp, synthetic construct
  misc_feature 1..57: note = Description of sequence: Primer
  source 1..57: mol_type = other DNA
cgaggtgcttcgttacagaaaacttgaaatagatgccatcagcttgtcgtcatcgtc

SEQ ID NO: 299 - DNA, 57 bp, synthetic construct
  misc_feature 1..57: note = Description of sequence: Primer
  source 1..57: mol_type = other DNA
cgaggtgcttcgttatgccgagaaatgcagagcgaacagcagcttgtcgtcatcgtc

SEQ ID NO: 300 - DNA, 57 bp, synthetic construct
  misc_feature 1..57: note = Description of sequence: Primer
  source 1..57: mol_type = other DNA
cgaggtgcttcgttaaatacccggataatgcttaatcagacgcttgtcgtcatcgtc

SEQ ID NO: 301 - DNA, 57 bp, synthetic construct
  misc_feature 1..57: note = Description of sequence: Primer
  source 1..57: mol_type = other DNA
cgaggtgcttcgttacagaacaccagaatagctgctcataaacttgtcgtcatcgtc

SEQ ID NO: 302 - DNA, 57 bp, synthetic construct
  misc_feature 1..57: note = Description of sequence: Primer
  source 1..57: mol_type = other DNA
cgaggtgcttcgttaaaccattgccagcagcggacccatacccttgtcgtcatcgtc

SEQ ID NO: 303 - DNA, 60 bp, synthetic construct
  misc_feature 1..60: note = Description of sequence: Primer
  source 1..60: mol_type = other DNA
cgaggtgcttcgttacagaaagatggtgaagttttccagaacagacttgtcgtcatcgtc

SEQ ID NO: 304 - DNA, 60 bp, synthetic construct
  misc_feature 1..60: note = Description of sequence: Primer
  source 1..60: mol_type = other DNA
cgaggtgcttcgttaaaccagaaagatggtgaagttttccagaaccttgtcgtcatcgtc

SEQ ID NO: 305 - DNA, 57 bp, synthetic construct
  misc_feature 1..57: note = Description of sequence: Primer
  source 1..57: mol_type = other DNA
cgaggtgcttcgttacatattggtttccagggtcatcagaaacttgtcgtcatcgtc

SEQ ID NO: 306 - DNA, 60 bp, synthetic construct
  misc_feature 1..60: note = Description of sequence: Primer
  source 1..60: mol_type = other DNA
cgaggtgcttcgttaaacaacatagaaagaaactgcaaacgtaaccttgtcgtcatcgtc

SEQ ID NO: 307 - DNA, 57 bp, synthetic construct
  misc_feature 1..57: note = Description of sequence: Primer
  source 1..57: mol_type = other DNA
cgaggtgcttcgttacagcagtaaggtaacttgcagtaatgccttgtcgtcatcgtc

SEQ ID NO: 308 - DNA, 57 bp, synthetic construct
  misc_feature 1..57: note = Description of sequence: Primer
  source 1..57: mol_type = other DNA
cgaggtgcttcgttaaacagatgcagcgtgttcagaggtgtacttgtcgtcatcgtc

SEQ ID NO: 309 - DNA, 57 bp, synthetic construct
  misc_feature 1..57: note = Description of sequence: Primer
  source 1..57: mol_type = other DNA
cgaggtgcttcgttaggtttccaggaaggtttcagccagagacttgtcgtcatcgtc

SEQ ID NO: 310 - DNA, 57 bp, synthetic construct
  misc_feature 1..57: note = Description of sequence: Primer
  source 1..57: mol_type = other DNA
cgaggtgcttcgttaaacggtgttagagatagctgccatcgtcttgtcgtcatcgtc

SEQ ID NO: 311 - DNA, 57 bp, synthetic construct
  misc_feature 1..57: note = Description of sequence: Primer
  source 1..57: mol_type = other DNA
cgaggtgcttcgttacagcggaacagacggagatgccagaaacttgtcgtcatcgtc

SEQ ID NO: 312 - DNA, 57 bp, synthetic construct
  misc_feature 1..57: note = Description of sequence: Primer
  source 1..57: mol_type = other DNA
cgaggtgcttcgttaaacagacggagatgccaggaacatatacttgtcgtcatcgtc

SEQ ID NO: 313 - DNA, 57 bp, synthetic construct
  misc_feature 1..57: note = Description of sequence: Primer
  source 1..57: mol_type = other DNA
cgaggtgcttcgttacagagacacatcatgtttcagcagcatcttgtcgtcatcgtc

SEQ ID NO: 314 - DNA, 57 bp, synthetic construct
  misc_feature 1..57: note = Description of sequence: Primer
  source 1..57: mol_type = other DNA
cgaggtgcttcgttacagaacaattaacatattcagcagtaacttgtcgtcatcgtc

SEQ ID NO: 315 - DNA, 57 bp, synthetic construct
  misc_feature 1..57: note = Description of sequence: Primer
  source 1..57: mol_type = other DNA
cgaggtgcttcgttacagagcagaggtataaccgatcataaacttgtcgtcatcgtc

SEQ ID NO: 316 - DNA, 57 bp, synthetic construct
  misc_feature 1..57: note = Description of sequence: Primer
  source 1..57: mol_type = other DNA
cgaggtgcttcgttaggtgtaaccaatcataaacagcaggtacttgtcgtcatcgtc

SEQ ID NO: 317 - DNA, 57 bp, synthetic construct
  misc_feature 1..57: note = Description of sequence: Primer
  source 1..57: mol_type = other DNA
cgaggtgcttcgttaaaccggatcaatgtccagcggcagtttcttgtcgtcatcgtc

SEQ ID NO: 318 - DNA, 57 bp, synthetic construct
  misc_feature 1..57: note = Description of sequence: Primer
  source 1..57: mol_type = other DNA
cgaggtgcttcgttagatttcaaaactctggttcagttggaacttgtcgtcatcgtc

SEQ ID NO: 319 - DNA, 57 bp, synthetic construct
  misc_feature 1..57: note = Description of sequence: Primer
  source 1..57: mol_type = other DNA
cgaggtgcttcgttagatcaggtgaataaacgggataatcagcttgtcgtcatcgtc

SEQ ID NO: 320 - DNA, 57 bp, synthetic construct
  misc_feature 1..57: note = Description of sequence: Primer
  source 1..57: mol_type = other DNA
cgaggtgcttcgttaaattgagctacttgcccagaacattaacttgtcgtcatcgtc

SEQ ID NO: 321 - DNA, 57 bp, synthetic construct
  misc_feature 1..57: note = Description of sequence: Primer
  source 1..57: mol_type = other DNA
cgaggtgcttcgttagatcaggtacaggtgtgagataatcatcttgtcgtcatcgtc

SEQ ID NO: 322 - DNA, 57 bp, synthetic construct
  misc_feature 1..57: note = Description of sequence: Primer
  source 1..57: mol_type = other DNA
cgaggtgcttcgttaaacagaaacatccaggtaaatcaggaacttgtcgtcatcgtc

SEQ ID NO: 323 - DNA, 57 bp, synthetic construct
  misc_feature 1..57: note = Description of sequence: Primer
  source 1..57: mol_type = other DNA
cgaggtgcttcgttaaacagaaacattgaaaatcagcagtaacttgtcgtcatcgtc

SEQ ID NO: 324 - DNA, 57 bp, synthetic construct
  misc_feature 1..57: note = Description of sequence: Primer
  source 1..57: mol_type = other DNA
cgaggtgcttcgttaaacaaacagattcatccacagcaggctcttgtcgtcatcgtc

SEQ ID NO: 325 - DNA, 57 bp, synthetic construct
  misc_feature 1..57: note = Description of sequence: Primer
  source 1..57: mol_type = other DNA
cgaggtgcttcgttacacatgataccatttttcctgggtgaacttgtcgtcatcgtc

SEQ ID NO: 326 - DNA, 57 bp, synthetic construct
  misc_feature 1..57: note = Description of sequence: Primer
  source 1..57: mol_type = other DNA
cgaggtgcttcgttaaacagaaatgtcctgaataaacagattcttgtcgtcatcgtc

SEQ ID NO: 327 - DNA, 57 bp, synthetic construct
  misc_feature 1..57: note = Description of sequence: Primer
  source 1..57: mol_type = other DNA
cgaggtgcttcgttaggtgtttttaatcagttcgtccaggtacttgtcgtcatcgtc

SEQ ID NO: 328 - DNA, 57 bp, synthetic construct
  misc_feature 1..57: note = Description of sequence: Primer
  source 1..57: mol_type = other DNA
cgaggtgcttcgttaaacttcgttaccacgagattgcaggaacttgtcgtcatcgtc

SEQ ID NO: 329 - DNA, 57 bp, synthetic construct
  misc_feature 1..57: note = Description of sequence: Primer
  source 1..57: mol_type = other DNA
cgaggtgcttcgttaaactttttcttccatgtcggtcaggatcttgtcgtcatcgtc

SEQ ID NO: 330 - DNA, 57 bp, synthetic construct; identical to SEQ ID NO: 145
  misc_feature 1..57: note = Description of sequence: Primer
  source 1..57: mol_type = other DNA

SEQ ID NO: 331 - DNA, 57 bp, synthetic construct; identical to SEQ ID NO: 162
  misc_feature 1..57: note = Description of sequence: Primer
  source 1..57: mol_type = other DNA

SEQ ID NO: 332 - DNA, 57 bp, synthetic construct
  misc_feature 1..57: note = Description of sequence: Primer
  source 1..57: mol_type = other DNA
cgaggtgcttcgttaaacaggtttgtcaaccggcagcatacccttgtcgtcatcgtc

SEQ ID NO: 333 - DNA, 57 bp, synthetic construct
  misc_feature 1..57: note = Description of sequence: Primer
  source 1..57: mol_type = other DNA
cgaggtgcttcgttaaaccggcagcatacccagatactgaaccttgtcgtcatcgtc

SEQ ID NO: 334 - DNA, 57 bp, synthetic construct
  misc_feature 1..57: note = Description of sequence: Primer
  source 1..57: mol_type = other DNA
cgaggtgcttcgttacagttcatattccacgtgcggtaaacgcttgtcgtcatcgtc

SEQ ID NO: 335 - DNA, 57 bp, synthetic construct
  misc_feature 1..57: note = Description of sequence: Primer
  source 1..57: mol_type = other DNA
cgaggtgcttcgttaaacgtgtaacggagatgcgcccagtttcttgtcgtcatcgtc

SEQ ID NO: 336 - DNA, 57 bp, synthetic construct
  misc_feature 1..57: note = Description of sequence: Primer
  source 1..57: mol_type = other DNA
cgaggtgcttcgttacagggtgaaaacgtccacattcaggatcttgtcgtcatcgtc

SEQ ID NO: 337 - DNA, 57 bp, synthetic construct
  misc_feature 1..57: note = Description of sequence: Primer
  source 1..57: mol_type = other DNA
cgaggtgcttcgttacaggtgggtggtgaaaacgtaaacaaacttgtcgtcatcgtc

SEQ ID NO: 338 - DNA, 57 bp, synthetic construct
  misc_feature 1..57: note = Description of sequence: Primer
  source 1..57: mol_type = other DNA
cgaggtgcttcgttacagacgtgcctgggtcagcagcatgaacttgtcgtcatcgtc

SEQ ID NO: 339 - DNA, 60 bp, synthetic construct
  misc_feature 1..60: note = Description of sequence: Primer
  source 1..60: mol_type = other DNA
cgaggtgcttcgttacacaccaaccagagccaggatagacagcatcttgtcgtcatcgtc

SEQ ID NO: 340 - DNA, 57 bp, synthetic construct
  misc_feature 1..57: note = Description of sequence: Primer
  source 1..57: mol_type = other DNA
cgaggtgcttcgttaaacttcaaccggggtgtaagacagagccttgtcgtcatcgtc

SEQ ID NO: 341 - DNA, 60 bp, synthetic construct
  misc_feature 1..60: note = Description of sequence: Primer
  source 1..60: mol_type = other DNA
cgaggtgcttcgttagatcagacccaggtcaccgtccatcaggttcttgtcgtcatcgtc

SEQ ID NO: 342 - DNA, 57 bp, synthetic construct
  misc_feature 1..57: note = Description of sequence: Primer
  source 1..57: mol_type = other DNA
cgaggtgcttcgttacagacccaggtcaccgtccatcaggttcttgtcgtcatcgtc

SEQ ID NO: 343 - DNA, 57 bp, synthetic construct
  misc_feature 1..57: note = Description of sequence: Primer
  source 1..57: mol_type = other DNA
cgaggtgcttcgttacagagacggagagtgcagaaccatcagcttgtcgtcatcgtc

SEQ ID NO: 344 - DNA, 57 bp, synthetic construct
  misc_feature 1..57: note = Description of sequence: Primer
  source 1..57: mol_type = other DNA
cgaggtgcttcgttatgctttcaggatctgctcaaacagtttcttgtcgtcatcgtc

SEQ ID NO: 345 - DNA, 57 bp, synthetic construct
  misc_feature 1..57: note = Description of sequence: Primer
  source 1..57: mol_type = other DNA
cgaggtgcttcgttacagtttggtacgcagggtcagcatgtacttgtcgtcatcgtc

SEQ ID NO: 346 - DNA, 57 bp, synthetic construct
  misc_feature 1..57: note = Description of sequence: Primer
  source 1..57: mol_type = other DNA
cgaggtgcttcgttagatagcgataacaaaagaggtcagacccttgtcgtcatcgtc

SEQ ID NO: 347 - DNA, 57 bp, synthetic construct
  misc_feature 1..57: note = Description of sequence: Primer
  source 1..57: mol_type = other DNA
cgaggtgcttcgttaaaccaggtacgggtggtcagacaggaacttgtcgtcatcgtc

SEQ ID NO: 348 - DNA, 57 bp, synthetic construct
  misc_feature 1..57: note = Description of sequence: Primer
  source 1..57: mol_type = other DNA
cgaggtgcttcgttacagaccagagaagatagcgaacaggtacttgtcgtcatcgtc

SEQ ID NO: 349 - DNA, 57 bp, synthetic construct
  misc_feature 1..57: note = Description of sequence: Primer
  source 1..57: mol_type = other DNA
cgaggtgcttcgttaaacaaccggggtgatggtgttcagtttcttgtcgtcatcgtc

SEQ ID NO: 350 - DNA, 57 bp, synthetic construct
  misc_feature 1..57: note = Description of sequence: Primer
  source 1..57: mol_type = other DNA
cgaggtgcttcgttacagaccgtgagcgtcgtccaccagaaccttgtcgtcatcgtc

SEQ ID NO: 351 - DNA, 57 bp, synthetic construct
  misc_feature 1..57: note = Description of sequence: Primer
  source 1..57: mol_type = other DNA
cgaggtgcttcgttatgcaacaataacagcgaacatcagcatcttgtcgtcatcgtc

SEQ ID NO: 352 - DNA, 57 bp, synthetic construct
  misc_feature 1..57: note = Description of sequence: Primer
  source 1..57: mol_type = other DNA
cgaggtgcttcgttacactcccgccagcgtacctgctaacagcttgtcgtcatcgtc

SEQ ID NO: 353 - DNA, 57 bp, synthetic construct
  misc_feature 1..57: note = Description of sequence: Primer
  source 1..57: mol_type = other DNA
cgaggtgcttcgttatgcacgaggagacagcggagccagagacttgtcgtcatcgtc

SEQ ID NO: 354 - DNA, 60 bp, synthetic construct
  misc_feature 1..60: note = Description of sequence: Primer
  source 1..60: mol_type = other DNA
cgaggtgcttcgttaaacgccagacagtttcacacccagcagaaccttgtcgtcatcgtc

SEQ ID NO: 355 - DNA, 57 bp, synthetic construct
  misc_feature 1..57: note = Description of sequence: Primer
  source 1..57: mol_type = other DNA
cgaggtgcttcgttaaacggtgcccacaatggtaaacagggtcttgtcgtcatcgtc

SEQ ID NO: 356 - DNA, 57 bp, synthetic construct
  misc_feature 1..57: note = Description of sequence: Primer
  source 1..57: mol_type = other DNA
cgaggtgcttcgttaaacattcggaactttcatagccagcagcttgtcgtcatcgtc

SEQ ID NO: 357 - DNA, 60 bp, synthetic construct
  misc_feature 1..60: note = Description of sequence: Primer
  source 1..60: mol_type = other DNA
cgaggtgcttcgttaaacttccagaccgttgattttggtcataaacttgtcgtcatcgtc

SEQ ID NO: 358 - DNA, 57 bp, synthetic construct
  misc_feature 1..57: note = Description of sequence: Primer
  source 1..57: mol_type = other DNA
cgaggtgcttcgttacataacagacagcaggtcgttcaggaacttgtcgtcatcgtc

SEQ ID NO: 359 - DNA, 57 bp, synthetic construct
  misc_feature 1..57: note = Description of sequence: Primer
  source 1..57: mol_type = other DNA
cgaggtgcttcgttaaatgaaccatgcgatagccatcagacccttgtcgtcatcgtc

SEQ ID NO: 360 - DNA, 57 bp, synthetic construct
  misc_feature 1..57: note = Description of sequence: Primer
  source 1..57: mol_type = other DNA
cgaggtgcttcgttaaacagcaacaacataagagatgatgaacttgtcgtcatcgtc

SEQ ID NO: 361 - DNA, 57 bp, synthetic construct; identical to SEQ ID NO: 147
  misc_feature 1..57: note = Description of sequence: Primer
  source 1..57: mol_type = other DNA

SEQ ID NO: 362 - DNA, 57 bp, synthetic construct
  misc_feature 1..57: note = Description of sequence: Primer
  source 1..57: mol_type = other DNA
cgaggtgcttcgttaaacattagcagcccagtccagcagaatcttgtcgtcatcgtc

SEQ ID NO: 363 - DNA, 57 bp, synthetic construct
  misc_feature 1..57: note = Description of sequence: Primer
  source 1..57: mol_type = other DNA
cgaggtgcttcgttaaaccggagacagttcagagaacagagccttgtcgtcatcgtc

SEQ ID NO: 364 - DNA, 57 bp, synthetic construct
  misc_feature 1..57: note = Description of sequence: Primer
  source 1..57: mol_type = other DNA
cgaggtgcttcgttacagttcggtgtagtattccagcagagacttgtcgtcatcgtc

SEQ ID NO: 365 - DNA, 57 bp, synthetic construct
  misc_feature 1..57: note = Description of sequence: Primer
  source 1..57: mol_type = other DNA
cgaggtgcttcgttaaacttcaaacggagatttcgcaatgtgcttgtcgtcatcgtc

SEQ ID NO: 366 - DNA, 57 bp, synthetic construct; identical to SEQ ID NO: 152
  misc_feature 1..57: note = Description of sequence: Primer
  source 1..57: mol_type = other DNA

SEQ ID NO: 367 - DNA, 57 bp, synthetic construct
  misc_feature 1..57: note = Description of sequence: Primer
  source 1..57: mol_type = other DNA
cgaggtgcttcgttaaacggtcacaaacagatccattgcggtcttgtcgtcatcgtc

SEQ ID NO: 368 - DNA, 57 bp, synthetic construct
  misc_feature 1..57: note = Description of sequence: Primer
  source 1..57: mol_type = other DNA
cgaggtgcttcgttaaacaaacaggtccatagcggtaacatacttgtcgtcatcgtc

SEQ ID NO: 369 - DNA, 57 bp, synthetic construct
  misc_feature 1..57: note = Description of sequence: Primer
  source 1..57: mol_type = other DNA
cgaggtgcttcgttatgcgccaacaatccaggtaacaacgtacttgtcgtcatcgtc

SEQ ID NO: 370 - DNA, 57 bp, synthetic construct
  misc_feature 1..57: note = Description of sequence: Primer
  source 1..57: mol_type = other DNA
cgaggtgcttcgttacagaaccggaacagaaccatacagagccttgtcgtcatcgtc

SEQ ID NO: 371 - DNA, 60 bp, synthetic construct; identical to SEQ ID NO: 153
  misc_feature 1..60: note = Description of sequence: Primer
  source 1..60: mol_type = other DNA

SEQ ID NO: 372 - DNA, 57 bp, synthetic construct
  misc_feature 1..57: note = Description of sequence: Primer
  source 1..57: mol_type = other DNA
cgaggtgcttcgttacagcagagacagggtttccagcagagccttgtcgtcatcgtc

SEQ ID NO: 373 - DNA, 57 bp, synthetic construct
  misc_feature 1..57: note = Description of sequence: Primer
  source 1..57: mol_type = other DNA
cgaggtgcttcgttagatccagtaaaacatattgaagatcagcttgtcgtcatcgtc

SEQ ID NO: 374 - DNA, 57 bp, synthetic construct
  misc_feature 1..57: note = Description of sequence: Primer
  source 1..57: mol_type = other DNA
cgaggtgcttcgttaaaccggagaggtggtcgggtccagagacttgtcgtcatcgtc

SEQ ID NO: 375 - DNA, 57 bp, synthetic construct
  misc_feature 1..57: note = Description of sequence: Primer
  source 1..57: mol_type = other DNA
cgaggtgcttcgttacaggtagatgttagccagagacattttcttgtcgtcatcgtc

SEQ ID NO: 376 - DNA, 57 bp, synthetic construct
  misc_feature 1..57: note = Description of sequence: Primer
  source 1..57: mol_type = other DNA
cgaggtgcttcgttaaaccaggaagtccagcgggaaagagaacttgtcgtcatcgtc

SEQ ID NO: 377 - DNA, 57 bp, synthetic construct
  misc_feature 1..57: note = Description of sequence: Primer
  source 1..57: mol_type = other DNA
cgaggtgcttcgttacagcttcacggtatattcttgcagaaacttgtcgtcatcgtc

SEQ ID NO: 378 - DNA, 57 bp, synthetic construct
  misc_feature 1..57: note = Description of sequence: Primer
  source 1..57: mol_type = other DNA
cgaggtgcttcgttagattttggtaatcatagcgttcaggatcttgtcgtcatcgtc

SEQ ID NO: 379 - DNA, 57 bp, synthetic construct
  misc_feature 1..57: note = Description of sequence: Primer
  source 1..57: mol_type = other DNA
cgaggtgcttcgttagatgtaagcgtgcagttcagacagtttcttgtcgtcatcgtc

SEQ ID NO: 380 - DNA, 57 bp, synthetic construct
  misc_feature 1..57: note = Description of sequence: Primer
  source 1..57: mol_type = other DNA
cgaggtgcttcgttaaacgctaaccggcagtaacagcagagacttgtcgtcatcgtc

SEQ ID NO: 381 - DNA, 57 bp, synthetic construct
  misc_feature 1..57: note = Description of sequence: Primer
  source 1..57: mol_type = other DNA
cgaggtgcttcgttacagggtcacggtcagttttgccatatacttgtcgtcatcgtc

SEQ ID NO: 382 - DNA, 57 bp, synthetic construct
  misc_feature 1..57: note = Description of sequence: Primer
  source 1..57: mol_type = other DNA
cgaggtgcttcgttacagttcacccggagaaccatacatatacttgtcgtcatcgtc

SEQ ID NO: 383 - DNA, 60 bp, synthetic construct
  misc_feature 1..60: note = Description of sequence: Primer
  source 1..60: mol_type = other DNA
cgaggtgcttcgttaaacaatgtaaacaatagagaacggcataaccttgtcgtcatcgtc

SEQ ID NO: 384 - DNA, 57 bp, synthetic construct
  misc_feature 1..57: note = Description of sequence: Primer
  source 1..57: mol_type = other DNA
cgaggtgcttcgttagatgtaaacgatagagaacggcataaccttgtcgtcatcgtc

SEQ ID NO: 385 - DNA, 60 bp, synthetic construct
  misc_feature 1..60: note = Description of sequence: Primer
  source 1..60: mol_type = other DNA
cgaggtgcttcgttagatgtaaacaatagagaacggcataaccagcttgtcgtcatcgtc

SEQ ID NO: 386 - DNA, 60 bp, synthetic construct
  misc_feature 1..60: note = Description of sequence: Primer
  source 1..60: mol_type = other DNA
cgaggtgcttcgttacaggtagaacaggtgagaagaagacatggtcttgtcgtcatcgtc

SEQ ID NO: 387 - DNA, 57 bp, synthetic construct
  misc_feature 1..57: note = Description of sequence: Primer
  source 1..57: mol_type = other DNA
cgaggtgcttcgttacagcaggatagaaatgccggtaatgaacttgtcgtcatcgtc

SEQ ID NO: 388 - DNA, 57 bp, synthetic construct
  misc_feature 1..57: note = Description of sequence: Primer
  source 1..57: mol_type = other DNA
cgaggtgcttcgttaaaccaggaatgcacggtgcagcagaaccttgtcgtcatcgtc

SEQ ID NO: 389 - DNA, 57 bp, synthetic construct
  misc_feature 1..57: note = Description of sequence: Primer
  source 1..57: mol_type = other DNA
cgaggtgcttcgttaaaccaggttcagaacttcagaagagaacttgtcgtcatcgtc

SEQ ID NO: 390 - DNA, 57 bp, synthetic construct
  misc_feature 1..57: note = Description of sequence: Primer
  source 1..57: mol_type = other DNA
cgaggtgcttcgttacagaaactccaggtacggacccagacgcttgtcgtcatcgtc

SEQ ID NO: 391 - DNA, 57 bp, synthetic construct
  misc_feature 1..57: note = Description of sequence: Primer
  source 1..57: mol_type = other DNA
cgaggtgcttcgttaaaccggcataatttcacgagacagtttcttgtcgtcatcgtc

SEQ ID NO: 392 - DNA, 57 bp, synthetic construct
  misc_feature 1..57: note = Description of sequence: Primer
  source 1..57: mol_type = other DNA
cgaggtgcttcgttaaacatagtacggtaagattgccagcagcttgtcgtcatcgtc

SEQ ID NO: 393 - DNA, 57 bp, synthetic construct
  misc_feature 1..57: note = Description of sequence: Primer
  source 1..57: mol_type = other DNA
cgaggtgcttcgttaagcgtttgcgttcaggtccggcagaaacttgtcgtcatcgtc

SEQ ID NO: 394 - DNA, 57 bp, synthetic construct
  misc_feature 1..57: note = Description of sequence: Primer
  source 1..57: mol_type = other DNA
cgaggtgcttcgttagatcggagaagagatttcagaggtgtacttgtcgtcatcgtc

SEQ ID NO: 395 - DNA, 57 bp, synthetic construct
  misc_feature 1..57: note = Description of sequence: Primer
  source 1..57: mol_type = other DNA
cgaggtgcttcgttacagagccggatagcgattgaacaggttcttgtcgtcatcgtc

SEQ ID NO: 396 - DNA, 60 bp, synthetic construct
  misc_feature 1..60: note = Description of sequence: Primer
  source 1..60: mol_type = other DNA
cgaggtgcttcgttacagcagccaggtaactgatgcgatcaggaacttgtcgtcatcgtc

SEQ ID NO: 397 - DNA, 57 bp, synthetic construct
  misc_feature 1..57: note = Description of sequence: Primer
  source 1..57: mol_type = other DNA
cgaggtgcttcgttacagccaggtaacagatgcgatcaggaacttgtcgtcatcgtc

SEQ ID NO: 398 - DNA, 57 bp, synthetic construct
  misc_feature 1..57: note = Description of sequence: Primer
  source 1..57: mol_type = other DNA
cgaggtgcttcgttaaacagcttccataaattcgtccaggaacttgtcgtcatcgtc

SEQ ID NO: 399 - DNA, 57 bp, synthetic construct; identical to SEQ ID NO: 154
  misc_feature 1..57: note = Description of sequence: Primer
  source 1..57: mol_type = other DNA

SEQ ID NO: 400 - DNA, 57 bp, synthetic construct
  misc_feature 1..57: note = Description of sequence: Primer
  source 1..57: mol_type = other DNA
cgaggtgcttcgttaagccagttgaacggcaggccataaatacttgtcgtcatcgtc

SEQ ID NO: 401 - DNA, 57 bp, synthetic construct
  misc_feature 1..57: note = Description of sequence: Primer
  source 1..57: mol_type = other DNA
cgaggtgcttcgttaaacaacacgtaacggttcccataaacgcttgtcgtcatcgtc

SEQ ID NO: 402 - DNA, 60 bp, synthetic construct
  misc_feature 1..60: note = Description of sequence: Primer
  source 1..60: mol_type = other DNA
cgaggtgcttcgttacagcaggcacggggtcataccgaacagcagcttgtcgtcatcgtc

SEQ ID NO: 403 - DNA, 57 bp, synthetic construct; identical to SEQ ID NO: 158
  misc_feature 1..57: note = Description of sequence: Primer
  source 1..57: mol_type = other DNA

SEQ ID NO: 404 - DNA, 57 bp, synthetic construct
  misc_feature 1..57: note = Description of sequence: Primer
  source 1..57: mol_type = other DNA
cgaggtgcttcgttacagtttcgcaatggtttcgtccagacccttgtcgtcatcgtc

SEQ ID NO: 405 - DNA, 57 bp, synthetic construct
  misc_feature 1..57: note = Description of sequence: Primer
  source 1..57: mol_type = other DNA
cgaggtgcttcgttaaacaggcggcggcataccaataacacgcttgtcgtcatcgtc

SEQ ID NO: 406 - DNA, 57 bp, synthetic construct
  misc_feature 1..57: note = Description of sequence: Primer
  source 1..57: mol_type = other DNA
cgaggtgcttcgttaaacttccggttctttttcgtccagcagcttgtcgtcatcgtc

SEQ ID NO: 407 - DNA, 57 bp, synthetic construct
  misc_feature 1..57: note = Description of sequence: Primer
  source 1..57: mol_type = other DNA
cgaggtgcttcgttagatagaagagtaatactggtcaatgaacttgtcgtcatcgtc

SEQ ID NO: 408 - DNA, 57 bp, synthetic construct
  misc_feature 1..57: note = Description of sequence: Primer
  source 1..57: mol_type = other DNA
cgaggtgcttcgttatgcttcgtagttcagacccgtcagaatcttgtcgtcatcgtc

SEQ ID NO: 409 - DNA, 57 bp, synthetic construct
  misc_feature 1..57: note = Description of sequence: Primer
  source 1..57: mol_type = other DNA
cgaggtgcttcgttacagggtcgggtcagcagggtccagaatcttgtcgtcatcgtc

SEQ ID NO: 410 - DNA, 57 bp, synthetic construct
  misc_feature 1..57: note = Description of sequence: Primer
  source 1..57: mol_type = other DNA
cgaggtgcttcgttacaggaacggaaccataacaatcaggatcttgtcgtcatcgtc

SEQ ID NO: 411 - DNA, 57 bp, synthetic construct
  misc_feature 1..57: note = Description of sequence: Primer
  source 1..57: mol_type = other DNA
cgaggtgcttcgttacatcagggtaaccaggtacagcatgaacttgtcgtcatcgtc

SEQ ID NO: 412 - DNA, 57 bp, synthetic construct
  misc_feature 1..57: note = Description of sequence: Primer
  source 1..57: mol_type = other DNA
cgaggtgcttcgttaaacggtaaccaggtacatgaacaggaacttgtcgtcatcgtc

SEQ ID NO: 413 - DNA, 57 bp, synthetic construct
  misc_feature 1..57: note = Description of sequence: Primer
  source 1..57: mol_type = other DNA
cgaggtgcttcgttacagcagcgggaaaaacacgttcaggaacttgtcgtcatcgtc

SEQ ID NO: 414 - DNA, 57 bp, synthetic construct
  misc_feature 1..57: note = Description of sequence: Primer
  source 1..57: mol_type = other DNA
cgaggtgcttcgttacagtgccaggttacccagaaaaatatacttgtcgtcatcgtc

SEQ ID NO: 415 - DNA, 57 bp, synthetic construct
  misc_feature 1..57: note = Description of sequence: Primer
  source 1..57: mol_type = other DNA
cgaggtgcttcgttaggtggtatagaacacagcaaccattttcttgtcgtcatcgtc

SEQ ID NO: 416 - DNA, 57 bp, synthetic construct
  misc_feature 1..57: note = Description of sequence: Primer
  source 1..57: mol_type = other DNA
cgaggtgcttcgttacagggtgtagataaacggattcagaaccttgtcgtcatcgtc

SEQ ID NO: 417 - DNA, 57 bp, synthetic construct
  misc_feature 1..57: note = Description of sequence: Primer
  source 1..57: mol_type = other DNA
cgaggtgcttcgttaaacaaacacaaccagttcgttcacatacttgtcgtcatcgtc

SEQ ID NO: 418 - DNA, 60 bp, synthetic construct
  misc_feature 1..60: note = Description of sequence: Primer
  source 1..60: mol_type = other DNA
cgaggtgcttcgttaaacaacggtcacggtgtagatacccaggaacttgtcgtcatcgtc

SEQ ID NO: 419 - DNA, 57 bp, synthetic construct
  misc_feature 1..57: note = Description of sequence: Primer
  source 1..57: mol_type = other DNA
cgaggtgcttcgttaaacggtaacggtgtagatacccaggaacttgtcgtcatcgtc

SEQ ID NO: 420 - DNA, 57 bp, synthetic construct
  misc_feature 1..57: note = Description of sequence: Primer
  source 1..57: mol_type = other DNA
cgaggtgcttcgttagatagatgcgaaaaaggtgaacaggaacttgtcgtcatcgtc

SEQ ID NO: 421 - DNA, 57 bp, synthetic construct
  misc_feature 1..57: note = Description of sequence: Primer
  source 1..57: mol_type = other DNA
cgaggtgcttcgttagatagccagcagatagcagtcaatagacttgtcgtcatcgtc

SEQ ID NO: 422 - DNA, 57 bp, synthetic construct
  misc_feature 1..57: note = Description of sequence: Primer
  source 1..57: mol_type = other DNA
cgaggtgcttcgttacaggtgcggagaaccttgcagcagagacttgtcgtcatcgtc

SEQ ID NO: 423 - DNA, 57 bp, synthetic construct; identical to SEQ ID NO: 163
  misc_feature 1..57: note = Description of sequence: Primer
  source 1..57: mol_type = other DNA

SEQ ID NO: 424 - DNA, 57 bp, synthetic construct
  misc_feature 1..57: note = Description of sequence: Primer
  source 1..57: mol_type = other DNA
cgaggtgcttcgttaaacaaacagcagaacagagaacaggaacttgtcgtcatcgtc

SEQ ID NO: 425 - DNA, 57 bp, synthetic construct
  misc_feature 1..57: note = Description of sequence: Primer
  source 1..57: mol_type = other DNA
cgaggtgcttcgttaaacgcccataaccagcggcagaaccagcttgtcgtcatcgtc

SEQ ID NO: 426 - DNA, 57 bp, synthetic construct
  misc_feature 1..57: note = Description of sequence: Primer
  source 1..57: mol_type = other DNA
cgaggtgcttcgttacagcggcagaaccagatcatgcagacgcttgtcgtcatcgtc

SEQ ID NO: 427 - DNA, 57 bp, synthetic construct; identical to SEQ ID NO: 160
  misc_feature 1..57: note = Description of sequence: Primer
  source 1..57: mol_type = other DNA

SEQ ID NO: 428 - DNA, 57 bp, synthetic construct
  misc_feature 1..57: note = Description of sequence: Primer
  source 1..57: mol_type = other DNA
cgaggtgcttcgttatgccggaaaagagataatgctcagcagcttgtcgtcatcgtc

SEQ ID NO: 429 - DNA, 57 bp, synthetic construct
  misc_feature 1..57: note = Description of sequence: Primer
  source 1..57: mol_type = other DNA
cgaggtgcttcgttacatgaacggagagaaaacggtcaggaacttgtcgtcatcgtc

SEQ ID NO: 430 - DNA, 57 bp, synthetic construct
  misc_feature 1..57: note = Description of sequence: Primer
  source 1..57: mol_type = other DNA
cgaggtgcttcgttatgcagaagagaatgcagcgaacagaaccttgtcgtcatcgtc

SEQ ID NO: 431 - DNA, 57 bp, synthetic construct
  misc_feature 1..57: note = Description of sequence: Primer
  source 1..57: mol_type = other DNA
cgaggtgcttcgttacagaccccacagagaaaccagtaacagcttgtcgtcatcgtc

SEQ ID NO: 432 - DNA, 57 bp, synthetic construct
  misc_feature 1..57: note = Description of sequence: Primer
  source 1..57: mol_type = other DNA
cgaggtgcttcgttaaacttcaacaacaccacccagttgatgcttgtcgtcatcgtc

SEQ ID NO: 433 - DNA, 57 bp, synthetic construct
  misc_feature 1..57: note = Description of sequence: Primer
  source 1..57: mol_type = other DNA
cgaggtgcttcgttaaacacgttgaactgcatccaggatagacttgtcgtcatcgtc

SEQ ID NO: 434 - DNA, 57 bp, synthetic construct
  misc_feature 1..57: note = Description of sequence: Primer
  source 1..57: mol_type = other DNA
cgaggtgcttcgttacagagagttgcgatattcagacagtttcttgtcgtcatcgtc

SEQ ID NO: 435 - DNA, 60 bp, synthetic construct
  misc_feature 1..60: note = Description of sequence: Primer
  source 1..60: mol_type = other DNA
cgaggtgcttcgttaaatgaatttcaggttctggtctgctaacagcttgtcgtcatcgtc

SEQ ID NO: 436 - DNA, 57 bp, synthetic construct
  misc_feature 1..57: note = Description of sequence: Primer
  source 1..57: mol_type = other DNA
cgaggtgcttcgttacaggtacggctcaaaataattcagaaccttgtcgtcatcgtc

SEQ ID NO: 437 - DNA, 57 bp, synthetic construct
  misc_feature 1..57: note = Description of sequence: Primer
  source 1..57: mol_type = other DNA
cgaggtgcttcgttaaatagacggaattgcgccaaccagagccttgtcgtcatcgtc

SEQ ID NO: 438 - DNA, 57 bp, synthetic construct; identical to SEQ ID NO: 161
  misc_feature 1..57: note = Description of sequence: Primer
  source 1..57: mol_type = other DNA

SEQ ID NO: 439 - DNA, 57 bp, synthetic construct
  misc_feature 1..57: note = Description of sequence: Primer
  source 1..57: mol_type = other DNA
cgaggtgcttcgttaaaccggggtagagatttcaaccatgtgcttgtcgtcatcgtc

SEQ ID NO: 440 - DNA, 57 bp, synthetic construct
  misc_feature 1..57: note = Description of sequence: Primer
  source 1..57: mol_type = other DNA
cgaggtgcttcgttaaacaatttcgtcaccagccagcagtttcttgtcgtcatcgtc

SEQ ID NO: 441 - DNA, 60 bp, synthetic construct
  misc_feature 1..60: note = Description of sequence: Primer
  source 1..60: mol_type = other DNA
cgaggtgcttcgttaaacggtgtgaacaacctgaccacctaaaatcttgtcgtcatcgtc

SEQ ID NO: 442 - DNA, 57 bp, synthetic construct
  misc_feature 1..57: note = Description of sequence: Primer
  source 1..57: mol_type = other DNA
cgaggtgcttcgttacagaaaaacagggctacccgccattgccttgtcgtcatcgtc

SEQ ID NO: 443 - DNA, 57 bp, synthetic construct
  misc_feature 1..57: note = Description of sequence: Primer
  source 1..57: mol_type = other DNA
cgaggtgcttcgttaagctgcaatgatggtggtgctcatgtacttgtcgtcatcgtc

SEQ ID NO: 444 - DNA, 57 bp, synthetic construct
  misc_feature 1..57: note = Description of sequence: Primer
  source 1..57: mol_type = other DNA
cgaggtgcttcgttacagaccaaaaatctgagcaaccaggatcttgtcgtcatcgtc

SEQ ID NO: 445 - DNA, 57 bp, synthetic construct
  misc_feature 1..57: note = Description of sequence: Primer
  source 1..57: mol_type = other DNA
cgaggtgcttcgttacagacccagaacctgtgcaatcagaatcttgtcgtcatcgtc

SEQ ID NO: 446 - DNA, 60 bp, synthetic construct
  misc_feature 1..60: note = Description of sequence: Primer
  source 1..60: mol_type = other DNA
cgaggtgcttcgttacagacccaggaacagagcagcccagatacgcttgtcgtcatcgtc

SEQ ID NO: 447 - DNA, 57 bp, synthetic construct
  misc_feature 1..57: note = Description of sequence: Primer
  source 1..57: mol_type = other DNA
cgaggtgcttcgttacagcagaaccgtccaaccacccagcagcttgtcgtcatcgtc

SEQ ID NO: 448 - DNA, 60 bp, synthetic construct
  misc_feature 1..60: note = Description of sequence: Primer
  source 1..60: mol_type = other DNA
cgaggtgcttcgttaaacgccatgaaccaggaactcaaacagtttcttgtcgtcatcgtc

SEQ ID NO: 449 - DNA, 57 bp, synthetic construct
  misc_feature 1..57: note = Description of sequence: Primer
  source 1..57: mol_type = other DNA
cgaggtgcttcgttaggtgtacggcagcggtttagccagtttcttgtcgtcatcgtc

SEQ ID NO: 450 - DNA, 57 bp, synthetic construct; identical to SEQ ID NO: 159
  misc_feature 1..57: note = Description of sequence: Primer
  source 1..57: mol_type = other DNA

SEQ ID NO: 451 - DNA, 57 bp, synthetic construct
  misc_feature 1..57: note = Description of sequence: Primer
  source 1..57: mol_type = other DNA
cgaggtgcttcgttacagaccgtttgcttcgtccagcaggaacttgtcgtcatcgtc

SEQ ID NO: 452 - DNA, 57 bp, synthetic construct
  misc_feature 1..57: note = Description of sequence: Primer
  source 1..57: mol_type = other DNA
cgaggtgcttcgttaggtggtagccagagagtcttgcagatacttgtcgtcatcgtc

SEQ ID NO: 453 - DNA, 60 bp, synthetic construct
  misc_feature 1..60: note = Description of sequence: Primer
  source 1..60: mol_type = other DNA
cgaggtgcttcgttacagagaagaagagatagatgccatcaggaacttgtcgtcatcgtc

SEQ ID NO: 454 - DNA, 57 bp, synthetic construct
  misc_feature 1..57: note = Description of sequence: Primer
  source 1..57: mol_type = other DNA
cgaggtgcttcgttaagaagaagagatagatgccatcaggaacttgtcgtcatcgtc

SEQ ID NO: 455 - DNA, 57 bp, synthetic construct
  misc_feature 1..57: note = Description of sequence: Primer
  source 1..57: mol_type = other DNA
cgaggtgcttcgttacaggctgcttgaaatagatgccatcagcttgtcgtcatcgtc

SEQ ID NO: 456 - DNA, 57 bp, synthetic construct
  misc_feature 1..57: note = Description of sequence: Primer
  source 1..57: mol_type = other DNA
cgaggtgcttcgttatgccgagaagtacagagcgaacagcagcttgtcgtcatcgtc

SEQ ID NO: 457 - DNA, 57 bp, synthetic construct
  misc_feature 1..57: note = Description of sequence: Primer
  source 1..57: mol_type = other DNA
cgaggtgcttcgttaaatacccggatagtgtttcatcagacgcttgtcgtcatcgtc

SEQ ID NO: 458 - DNA, 57 bp, synthetic construct
  misc_feature 1..57: note = Description of sequence: Primer
  source 1..57: mol_type = other DNA
cgaggtgcttcgttacagaacaccagaatatgctgacatgaacttgtcgtcatcgtc

SEQ ID NO: 459 - DNA, 57 bp, synthetic construct
  misc_feature 1..57: note = Description of sequence: Primer
  source 1..57: mol_type = other DNA
cgaggtgcttcgttaaacggttgccagcagcggacccatacccttgtcgtcatcgtc

SEQ ID NO: 460 - DNA, 60 bp, synthetic construct; identical to SEQ ID NO: 149
  misc_feature 1..60: note = Description of sequence: Primer
  source 1..60: mol_type = other DNA

SEQ ID NO: 461 - DNA, 60 bp, synthetic construct; identical to SEQ ID NO: 148
  misc_feature 1..60: note = Description of sequence: Primer
  source 1..60: mol_type = other DNA

SEQ ID NO: 462 - DNA, 57 bp, synthetic construct
  misc_feature 1..57: note = Description of sequence: Primer
  source 1..57: mol_type = other DNA
cgaggtgcttcgttacattttggtttccagggtcatcaggaacttgtcgtcatcgtc

SEQ ID NO: 463 - DNA, 60 bp, synthetic construct
  misc_feature 1..60: note = Description of sequence: Primer
  source 1..60: mol_type = other DNA
cgaggtgcttcgttaaaccaggtagaaagaaactgcaaacgtaaccttgtcgtcatcgtc

SEQ ID NO: 464 - DNA, 57 bp, synthetic construct
  misc_feature 1..57: note = Description of sequence: Primer
  source 1..57: mol_type = other DNA
cgaggtgcttcgttacagcagtaaggtaacctgagacagagccttgtcgtcatcgtc

SEQ ID NO: 465 - DNA, 57 bp, synthetic construct
  misc_feature 1..57: note = Description of sequence: Primer
  source 1..57: mol_type = other DNA
cgaggtgcttcgttaaacagatgcagcgtgttccggggtgtacttgtcgtcatcgtc

SEQ ID NO: 466 - DNA, 57 bp, synthetic construct
  misc_feature 1..57: note = Description of sequence: Primer
  source 1..57: mol_type = other DNA
cgaggtgcttcgttaggtttcccagaaggtttcagccagagacttgtcgtcatcgtc

SEQ ID NO: 467 - DNA, 57 bp, synthetic construct
  misc_feature 1..57: note = Description of sequence: Primer
  source 1..57: mol_type = other DNA
cgaggtgcttcgttaaacggtgttagagatagcagccatacgcttgtcgtcatcgtc

SEQ ID NO: 468 - DNA, 57 bp, synthetic construct
  misc_feature 1..57: note = Description of sequence: Primer
  source 1..57: mol_type = other DNA
cgaggtgcttcgttacagcggaacagacggagaagccagaaccttgtcgtcatcgtc

SEQ ID NO: 469 - DNA, 57 bp, synthetic construct
  misc_feature 1..57: note = Description of sequence: Primer
  source 1..57: mol_type = other DNA
cgaggtgcttcgttaaacagacggagatgccagaaccatgtacttgtcgtcatcgtc

SEQ ID NO: 470 - DNA, 57 bp, synthetic construct
  misc_feature 1..57: note = Description of sequence: Primer
  source 1..57: mol_type = other DNA
cgaggtgcttcgttacagagacacgtcctgtttcagcagcatcttgtcgtcatcgtc

SEQ ID NO: 471 - DNA, 57 bp, synthetic construct
  misc_feature 1..57: note = Description of sequence: Primer
  source 1..57: mol_type = other DNA
cgaggtgcttcgttacagtgcaattaacatattcagcagtaacttgtcgtcatcgtc

SEQ ID NO: 472 - DNA, 57 bp, synthetic construct
  misc_feature 1..57: note = Description of sequence: Primer
  source 1..57: mol_type = other DNA
cgaggtgcttcgttacagagcagatgcgtaaccgatcataaacttgtcgtcatcgtc

SEQ ID NO: 473 - DNA, 57 bp, synthetic construct
  misc_feature 1..57: note = Description of sequence: Primer
  source 1..57: mol_type = other DNA
cgaggtgcttcgttatgcgtaaccaatcataaacagcaggtacttgtcgtcatcgtc

SEQ ID NO: 474 - DNA, 57 bp, synthetic construct
  misc_feature 1..57: note = Description of sequence: Primer
  source 1..57: mol_type = other DNA
cgaggtgcttcgttaaaccgggttgatgtccagcggcagtttcttgtcgtcatcgtc

SEQ ID NO: 475 - DNA, 57 bp, synthetic construct
  misc_feature 1..57: note = Description of sequence: Primer
  source 1..57: mol_type = other DNA
cgaggtgcttcgttagatttcaaatgactggttcagttgtgacttgtcgtcatcgtc

SEQ ID NO: 476 - DNA, 57 bp, synthetic construct; identical to SEQ ID NO: 157
  misc_feature 1..57: note = Description of sequence: Primer
  source 1..57: mol_type = other DNA

SEQ ID NO: 477 - DNA, 57 bp, synthetic construct
  misc_feature 1..57: note = Description of sequence: Primer
  source 1..57: mol_type = other DNA
cgaggtgcttcgttagattgagctacttgcccacagcattaacttgtcgtcatcgtc

SEQ ID NO: 478 - DNA, 57 bp, synthetic construct
  misc_feature 1..57: note = Description of sequence: Primer
  source 1..57: mol_type = other DNA
cgaggtgcttcgttagatcagagacaggtgtgagataatcatcttgtcgtcatcgtc

SEQ ID NO: 479 - DNA, 57 bp, synthetic construct; identical to SEQ ID NO: 144
  misc_feature 1..57: note = Description of sequence: Primer
  source 1..57: mol_type = other DNA

SEQ ID NO: 480 - DNA, 57 bp, synthetic construct
  misc_feature 1..57: note = Description of sequence: Primer
  source 1..57: mol_type = other DNA
cgaggtgcttcgttaaacagaaacattgaaggtcagcagtaacttgtcgtcatcgtc

SEQ ID NO: 481 - DNA, 57 bp, synthetic construct
  misc_feature 1..57: note = Description of sequence: Primer
  source 1..57: mol_type = other DNA
cgaggtgcttcgttaaacaaacgggttcatccacagcaggctcttgtcgtcatcgtc

SEQ ID NO: 482 - DNA, 57 bp, synthetic construct
  misc_feature 1..57: note = Description of sequence: Primer
  source 1..57: mol_type = other DNA
cgaggtgcttcgttaaacgtgataccattcttcctgggtgaacttgtcgtcatcgtc

SEQ ID NO: 483 - DNA, 57 bp, synthetic construct
  misc_feature 1..57: note = Description of sequence: Primer
  source 1..57: mol_type = other DNA
cgaggtgcttcgttaaacagaaatgtcctgtgaaaacagattcttgtcgtcatcgtc

SEQ ID NO: 484 - DNA, 75 bp, synthetic construct
  misc_feature 1..75: note = Description of sequence: Primer
  source 1..75: mol_type = other DNA
  misc_difference 24..43: note = n is any one of a, c, g and t
  misc_difference 24..43: note = this poistion may be absent
  misc_difference 75: note = n is any one of a, c, g and t
aagcagtggtatcaacgcagagtnnnnnnnnnnnnnnnnnnnnttttttttttttttttttttttttttttttvn

SEQ ID NO: 485 - DNA, 32 bp, synthetic construct
  misc_feature 1..32: note = Description of sequence: Primer
  source 1..32: mol_type = other DNA
  modified_base 31^32: mod_base = OTHER; note = locked nucleic acid
aagcagtggtatcaacgcagagtcgacrgrgg

SEQ ID NO: 486 - DNA, 23 bp, synthetic construct
  misc_feature 1..23: note = Description of sequence: Primer
  source 1..23: mol_type = other DNA
aagcagtggtatcaacgcagagt

SEQ ID NO: 487 - DNA, 59 bp, synthetic construct
  misc_feature 1..59: note = Description of sequence: Primer
  source 1..59: mol_type = other DNA
  misc_difference 25..44: note = n is any one of a, c, g and t
  misc_difference 25..44: note = this poistion may be absent
caagcagaagacggcatacgagatnnnnnnnnnnnnnnnnnnnngtctcgtgggctcgg

SEQ ID NO: 488 - DNA, 86 bp, synthetic construct
  misc_feature 1..86: note = Description of sequence: Primer
  source 1..86: mol_type = other DNA
  variation 59: note = n is any one of a, c, g and t
  variation 61: note = n is any one of a, c, g and t
  variation 63: note = n is any one of a, c, g and t
aatgatacggcgaccaccgagatctacactctttccctacacgacgctcttccgatctnhnhnaagcagtggtatcaacgcagagt

SEQ ID NO: 489-500 - skipped (12 entries)

SEQ ID NO: 501 - DNA, 90 bp, synthetic construct
  misc_feature 1..90: note = Description of sequence: Primer
  source 1..90: mol_type = other DNA
atggacgacgacgacaagcgtcagttcggtccggactggatcgttgcttaacgaagcacctcgctaaaaaaaaaaaaaaaaaaaaaaaaa

SEQ ID NO: 502 - DNA, 90 bp, synthetic construct
  misc_feature 1..90: note = Description of sequence: Primer
  source 1..90: mol_type = other DNA
atggacgacgacgacaagatggtttggggtccggacccgctgtacgtttaacgaagcacctcgctaaaaaaaaaaaaaaaaaaaaaaaaa

SEQ ID NO: 503 - DNA, 87 bp, synthetic construct
  misc_feature 1..87: note = Description of sequence: Primer
  source 1..87: mol_type = other DNA
atggacgacgacgacaagaacctggctcaggacctggctaccgtttaacgaagcacctcgctaaaaaaaaaaaaaaaaaaaaaaaaa

SEQ ID NO: 504 - DNA, 87 bp, synthetic construct
  misc_feature 1..87: note = Description of sequence: Primer
  source 1..87: mol_type = other DNA
atggacgacgacgacaagcagctggctcgtcagcaggttcacgtttaacgaagcacctcgctaaaaaaaaaaaaaaaaaaaaaaaaa

SEQ ID NO: 505 - DNA, 87 bp, synthetic construct
  misc_feature 1..87: note = Description of sequence: Primer
  source 1..87: mol_type = other DNA
atggacgacgacgacaagttcctgcaggacgttatgaacatcctgtaacgaagcacctcgctaaaaaaaaaaaaaaaaaaaaaaaaa

SEQ ID NO: 506 - DNA, 87 bp, synthetic construct
  misc_feature 1..87: note = Description of sequence: Primer
  source 1..87: mol_type = other DNA
atggacgacgacgacaagctgctgcaggaatacaactgggaactgtaacgaagcacctcgctaaaaaaaaaaaaaaaaaaaaaaaaa

SEQ ID NO: 507 - DNA, 90 bp, synthetic construct
  misc_feature 1..90: note = Description of sequence: Primer
  source 1..90: mol_type = other DNA
atggacgacgacgacaagcgtatgatggaatacggtaccaccatggtttaacgaagcacctcgctaaaaaaaaaaaaaaaaaaaaaaaaa

SEQ ID NO: 508 - DNA, 90 bp, synthetic construct
  misc_feature 1..90: note = Description of sequence: Primer
  source 1..90: mol_type = other DNA
atggacgacgacgacaaggttatgaacatcctgctgcagtacgttgtttaacgaagcacctcgctaaaaaaaaaaaaaaaaaaaaaaaaa

SEQ ID NO: 509 - DNA, 87 bp, synthetic construct
  misc_feature 1..87: note = Description of sequence: Primer
  source 1..87: mol_type = other DNA
atggacgacgacgacaaggttatgaacatcctgctgcagtacgtttaacgaagcacctcgctaaaaaaaaaaaaaaaaaaaaaaaaa

SEQ ID NO: 510 - DNA, 87 bp, synthetic construct
  misc_feature 1..87: note = Description of sequence: Primer
  source 1..87: mol_type = other DNA
atggacgacgacgacaaggaactggctgaatacctgtacaacatctaacgaagcacctcgctaaaaaaaaaaaaaaaaaaaaaaaaa

SEQ ID NO: 511 - DNA, 87 bp, synthetic construct
  misc_feature 1..87: note = Description of sequence: Primer
  source 1..87: mol_type = other DNA
atggacgacgacgacaagatcctgatgcactgccagaccaccctgtaacgaagcacctcgctaaaaaaaaaaaaaaaaaaaaaaaaa

SEQ ID NO: 512 - DNA, 87 bp, synthetic construct
  misc_feature 1..87: note = Description of sequence: Primer
  source 1..87: mol_type = other DNA
atggacgacgacgacaagatgctgtaccagcacctgctgccgctgtaacgaagcacctcgctaaaaaaaaaaaaaaaaaaaaaaaaa

SEQ ID NO: 513 - DNA, 90 bp, synthetic construct
  misc_feature 1..90: note = Description of sequence: Primer
  source 1..90: mol_type = other DNA
atggacgacgacgacaagggtatcgttgaacagtgctgcacctctatctaacgaagcacctcgctaaaaaaaaaaaaaaaaaaaaaaaaa

SEQ ID NO: 514 - DNA, 90 bp, synthetic construct
  misc_feature 1..90: note = Description of sequence: Primer
  source 1..90: mol_type = other DNA
atggacgacgacgacaaggctctgtggatgcgtctgctgccgctgctgtaacgaagcacctcgctaaaaaaaaaaaaaaaaaaaaaaaaa

SEQ ID NO: 515 - DNA, 90 bp, synthetic construct
  misc_feature 1..90: note = Description of sequence: Primer
  source 1..90: mol_type = other DNA
atggacgacgacgacaagctggctctgtggggtccggacccggctgcttaacgaagcacctcgctaaaaaaaaaaaaaaaaaaaaaaaaa

SEQ ID NO: 516 - DNA, 93 bp, synthetic construct
  misc_feature 1..93: note = Description of sequence: Primer
  source 1..93: mol_type = other DNA
atggacgacgacgacaagcgtctgctgccgctgctggctctgctggctctgtaacgaagcacctcgctaaaaaaaaaaaaaaaaaaaaaaaaa

SEQ ID NO: 517 - DNA, 87 bp, synthetic construct
  misc_feature 1..87: note = Description of sequence: Primer
  source 1..87: mol_type = other DNA
atggacgacgacgacaaggctctgtggatgcgtctgctgccgctgtaacgaagcacctcgctaaaaaaaaaaaaaaaaaaaaaaaaa

SEQ ID NO: 518 - DNA, 87 bp, synthetic construct
  misc_feature 1..87: note = Description of sequence: Primer
  source 1..87: mol_type = other DNA
atggacgacgacgacaagcacctggttgaagctctgtacctggtttaacgaagcacctcgctaaaaaaaaaaaaaaaaaaaaaaaaa

SEQ ID NO: 519 - DNA, 90 bp, synthetic construct
  misc_feature 1..90: note = Description of sequence: Primer
  source 1..90: mol_type = other DNA
atggacgacgacgacaagtctctgcagaaacgtggtatcgttgaacagtaacgaagcacctcgctaaaaaaaaaaaaaaaaaaaaaaaaa

SEQ ID NO: 520 - DNA, 87 bp, synthetic construct
  misc_feature 1..87: note = Description of sequence: Primer
  source 1..87: mol_type = other DNA
atggacgacgacgacaagtctctgcagccgctggctctggaaggttaacgaagcacctcgctaaaaaaaaaaaaaaaaaaaaaaaaa

SEQ ID NO: 521 - DNA, 87 bp, synthetic construct
  misc_feature 1..87: note = Description of sequence: Primer
  source 1..87: mol_type = other DNA
atggacgacgacgacaagtctctgtaccagctggaaaactactgctaacgaagcacctcgctaaaaaaaaaaaaaaaaaaaaaaaaa

SEQ ID NO: 522 - DNA, 90 bp, synthetic construct
  misc_feature 1..90: note = Description of sequence: Primer
  source 1..90: mol_type = other DNA
atggacgacgacgacaaggtttgcggtgaacgtggtttcttctacacctaacgaagcacctcgctaaaaaaaaaaaaaaaaaaaaaaaaa

SEQ ID NO: 523 - DNA, 90 bp, synthetic construct
  misc_feature 1..90: note = Description of sequence: Primer
  source 1..90: mol_type = other DNA
atggacgacgacgacaaggctctgtggggtccggacccggctgctgcttaacgaagcacctcgctaaaaaaaaaaaaaaaaaaaaaaaaa

SEQ ID NO: 524 - DNA, 87 bp, synthetic construct
  misc_feature 1..87: note = Description of sequence: Primer
  source 1..87: mol_type = other DNA
atggacgacgacgacaagcgtctgctgccgctgctggctctgctgtaacgaagcacctcgctaaaaaaaaaaaaaaaaaaaaaaaaa

SEQ ID NO: 525 - DNA, 84 bp, synthetic construct
  misc_feature 1..84: note = Description of sequence: Primer
  source 1..84: mol_type = other DNA
atggacgacgacgacaagtggggtccggacccggctgctgcttaacgaagcacctcgctaaaaaaaaaaaaaaaaaaaaaaaaa

SEQ ID NO: 526 - DNA, 87 bp, synthetic construct
  misc_feature 1..87: note = Description of sequence: Primer
  source 1..87: mol_type = other DNA
atggacgacgacgacaagttcctgatcgttctgtctgttgctctgtaacgaagcacctcgctaaaaaaaaaaaaaaaaaaaaaaaaa

SEQ ID NO: 527 - DNA, 87 bp, synthetic construct
  misc_feature 1..87: note = Description of sequence: Primer
  source 1..87: mol_type = other DNA
atggacgacgacgacaagaaactgcaggttttcctgatcgttctgtaacgaagcacctcgctaaaaaaaaaaaaaaaaaaaaaaaaa

SEQ ID NO: 528 - DNA, 87 bp, synthetic construct
  misc_feature 1..87: note = Description of sequence: Primer
  source 1..87: mol_type = other DNA
atggacgacgacgacaagttcctgtggtctgttttcatgctgatctaacgaagcacctcgctaaaaaaaaaaaaaaaaaaaaaaaaa

SEQ ID NO: 529 - DNA, 87 bp, synthetic construct
  misc_feature 1..87: note = Description of sequence: Primer
  source 1..87: mol_type = other DNA
atggacgacgacgacaagttcctgttcgctgttggtttctacctgtaacgaagcacctcgctaaaaaaaaaaaaaaaaaaaaaaaaa

SEQ ID NO: 530 - DNA, 87 bp, synthetic construct
  misc_feature 1..87: note = Description of sequence: Primer
  source 1..87: mol_type = other DNA
atggacgacgacgacaagctgaacatcgacctgctgtggtctgtttaacgaagcacctcgctaaaaaaaaaaaaaaaaaaaaaaaaa

SEQ ID NO: 531 - DNA, 87 bp, synthetic construct
  misc_feature 1..87: note = Description of sequence: Primer
  source 1..87: mol_type = other DNA
atggacgacgacgacaaggttctgttcggtctgggtttcgctatctaacgaagcacctcgctaaaaaaaaaaaaaaaaaaaaaaaaa

SEQ ID NO: 532 - DNA, 87 bp, synthetic construct
  misc_feature 1..87: note = Description of sequence: Primer
  source 1..87: mol_type = other DNA
atggacgacgacgacaagttcctgtggtctgttttctggctgatctaacgaagcacctcgctaaaaaaaaaaaaaaaaaaaaaaaaa

SEQ ID NO: 533 - DNA, 87 bp, synthetic construct
  misc_feature 1..87: note = Description of sequence: Primer
  source 1..87: mol_type = other DNA
atggacgacgacgacaagaacctgttcctgttcctgttcgctgtttaacgaagcacctcgctaaaaaaaaaaaaaaaaaaaaaaaaa

SEQ ID NO: 534 - DNA, 87 bp, synthetic construct
  misc_feature 1..87: note = Description of sequence: Primer
  source 1..87: mol_type = other DNA
atggacgacgacgacaagtacctgctgctgcgtgttctgaacatctaacgaagcacctcgctaaaaaaaaaaaaaaaaaaaaaaaaa

SEQ ID NO: 535 - DNA, 90 bp, synthetic construct
  misc_feature 1..90: note = Description of sequence: Primer
  source 1..90: mol_type = other DNA
atggacgacgacgacaagcacctgtgcggttctcacctggttgaagcttaacgaagcacctcgctaaaaaaaaaaaaaaaaaaaaaaaaa

SEQ ID NO: 536 - DNA, 90 bp, synthetic construct
  misc_feature 1..90: note = Description of sequence: Primer
  source 1..90: mol_type = other DNA
atggacgacgacgacaagtctcacctggttgaagctctgtacctggtttaacgaagcacctcgctaaaaaaaaaaaaaaaaaaaaaaaaa

SEQ ID NO: 537 - DNA, 90 bp, synthetic construct
  misc_feature 1..90: note = Description of sequence: Primer
  source 1..90: mol_type = other DNA
atggacgacgacgacaagctgtgcggttctcacctggttgaagctctgtaacgaagcacctcgctaaaaaaaaaaaaaaaaaaaaaaaaa

SEQ ID NO: 538 - DNA, 87 bp, synthetic construct
  misc_feature 1..87: note = Description of sequence: Primer
  source 1..87: mol_type = other DNA
atggacgacgacgacaaggctctgaccgctgttgctgaagaagtttaacgaagcacctcgctaaaaaaaaaaaaaaaaaaaaaaaaa

SEQ ID NO: 539 - DNA, 90 bp, synthetic construct
  misc_feature 1..90: note = Description of sequence: Primer
  source 1..90: mol_type = other DNA
atggacgacgacgacaagtctctgtaccacgtttacgaagttaacctgtaacgaagcacctcgctaaaaaaaaaaaaaaaaaaaaaaaaa

SEQ ID NO: 540 - DNA, 87 bp, synthetic construct
  misc_feature 1..87: note = Description of sequence: Primer
  source 1..87: mol_type = other DNA
atggacgacgacgacaagaccatcgctgacttctggcagatggtttaacgaagcacctcgctaaaaaaaaaaaaaaaaaaaaaaaaa

SEQ ID NO: 541 - DNA, 87 bp, synthetic construct
  misc_feature 1..87: note = Description of sequence: Primer
  source 1..87: mol_type = other DNA
atggacgacgacgacaaggttatcgttatgctgaccccgctggtttaacgaagcacctcgctaaaaaaaaaaaaaaaaaaaaaaaaa

SEQ ID NO: 542 - DNA, 87 bp, synthetic construct
  misc_feature 1..87: note = Description of sequence: Primer
  source 1..87: mol_type = other DNA
atggacgacgacgacaagctgctgccgccgctgctggaacacctgtaacgaagcacctcgctaaaaaaaaaaaaaaaaaaaaaaaaa

SEQ ID NO: 543 - DNA, 87 bp, synthetic construct
  misc_feature 1..87: note = Description of sequence: Primer
  source 1..87: mol_type = other DNA
atggacgacgacgacaagtctctggctgctggtgttaaactgctgtaacgaagcacctcgctaaaaaaaaaaaaaaaaaaaaaaaaa

SEQ ID NO: 544 - DNA, 87 bp, synthetic construct
  misc_feature 1..87: note = Description of sequence: Primer
  source 1..87: mol_type = other DNA
atggacgacgacgacaagtctctgtctccgctgcaggctgaactgtaacgaagcacctcgctaaaaaaaaaaaaaaaaaaaaaaaaa

SEQ ID NO: 545 - DNA, 87 bp, synthetic construct
  misc_feature 1..87: note = Description of sequence: Primer
  source 1..87: mol_type = other DNA
atggacgacgacgacaagatggtttgggaatctggttgcaccgtttaacgaagcacctcgctaaaaaaaaaaaaaaaaaaaaaaaaa

SEQ ID NO: 546 - DNA, 90 bp, synthetic construct
  misc_feature 1..90: note = Description of sequence: Primer
  source 1..90: mol_type = other DNA
atggacgacgacgacaaggttatgatcatcgtttcttctctggctgtttaacgaagcacctcgctaaaaaaaaaaaaaaaaaaaaaaaaa

SEQ ID NO: 547 - DNA, 87 bp, synthetic construct
  misc_feature 1..87: note = Description of sequence: Primer
  source 1..87: mol_type = other DNA
atggacgacgacgacaaggctctgggtgacctgttccagtctatctaacgaagcacctcgctaaaaaaaaaaaaaaaaaaaaaaaaa

SEQ ID NO: 548 - DNA, 87 bp, synthetic construct
  misc_feature 1..87: note = Description of sequence: Primer
  source 1..87: mol_type = other DNA
atggacgacgacgacaaggacctgacctctttcctgctgtctctgtaacgaagcacctcgctaaaaaaaaaaaaaaaaaaaaaaaaa

SEQ ID NO: 549 - DNA, 87 bp, synthetic construct
  misc_feature 1..87: note = Description of sequence: Primer
  source 1..87: mol_type = other DNA
atggacgacgacgacaaggaaatcctgggtgctctgctgtctatctaacgaagcacctcgctaaaaaaaaaaaaaaaaaaaaaaaaa

SEQ ID NO: 550 - DNA, 90 bp, synthetic construct
  misc_feature 1..90: note = Description of sequence: Primer
  source 1..90: mol_type = other DNA
atggacgacgacgacaagttcctgctgtctctgttctctctgtggctgtaacgaagcacctcgctaaaaaaaaaaaaaaaaaaaaaaaaa

SEQ ID NO: 551 - DNA, 90 bp, synthetic construct
  misc_feature 1..90: note = Description of sequence: Primer
  source 1..90: mol_type = other DNA
atggacgacgacgacaagatcctggctgttgacggtgttctgtctgtttaacgaagcacctcgctaaaaaaaaaaaaaaaaaaaaaaaaa

SEQ ID NO: 552 - DNA, 87 bp, synthetic construct
  misc_feature 1..87: note = Description of sequence: Primer
  source 1..87: mol_type = other DNA
atggacgacgacgacaagatcctgggtgctctgctgtctatcctgtaacgaagcacctcgctaaaaaaaaaaaaaaaaaaaaaaaaa

SEQ ID NO: 553 - DNA, 87 bp, synthetic construct
  misc_feature 1..87: note = Description of sequence: Primer
  source 1..87: mol_type = other DNA
atggacgacgacgacaagatcctgaaagacttctctatcctgctgtaacgaagcacctcgctaaaaaaaaaaaaaaaaaaaaaaaaa

SEQ ID NO: 554 - DNA, 87 bp, synthetic construct
  misc_feature 1..87: note = Description of sequence: Primer
  source 1..87: mol_type = other DNA
atggacgacgacgacaagatcctgtctgctcacgttgctaccgcttaacgaagcacctcgctaaaaaaaaaaaaaaaaaaaaaaaaa

SEQ ID NO: 555 - DNA, 87 bp, synthetic construct
  misc_feature 1..87: note = Description of sequence: Primer
  source 1..87: mol_type = other DNA
atggacgacgacgacaagctgctgatcgacctgacctctttcctgtaacgaagcacctcgctaaaaaaaaaaaaaaaaaaaaaaaaa

SEQ ID NO: 556 - DNA, 90 bp, synthetic construct
  misc_feature 1..90: note = Description of sequence: Primer
  source 1..90: mol_type = other DNA
atggacgacgacgacaagctgctgatggaaggtgttccgaaatctctgtaacgaagcacctcgctaaaaaaaaaaaaaaaaaaaaaaaaa

SEQ ID NO: 557 - DNA, 87 bp, synthetic construct
  misc_feature 1..87: note = Description of sequence: Primer
  source 1..87: mol_type = other DNA
atggacgacgacgacaagtctatctctgttctgatctctgctctgtaacgaagcacctcgctaaaaaaaaaaaaaaaaaaaaaaaaa

SEQ ID NO: 558 - DNA, 90 bp, synthetic construct
  misc_feature 1..90: note = Description of sequence: Primer
  source 1..90: mol_type = other DNA
atggacgacgacgacaagtctctgaactactctggtgttaaagaactgtaacgaagcacctcgctaaaaaaaaaaaaaaaaaaaaaaaaa

SEQ ID NO: 559 - DNA, 90 bp, synthetic construct
  misc_feature 1..90: note = Description of sequence: Primer
  source 1..90: mol_type = other DNA
atggacgacgacgacaagtctgttcactctctgcacatctggtctctgtaacgaagcacctcgctaaaaaaaaaaaaaaaaaaaaaaaaa

SEQ ID NO: 560 - DNA, 87 bp, synthetic construct
  misc_feature 1..87: note = Description of sequence: Primer
  source 1..87: mol_type = other DNA
atggacgacgacgacaaggttgttaccggtgttctggtttacctgtaacgaagcacctcgctaaaaaaaaaaaaaaaaaaaaaaaaa

SEQ ID NO: 561 - DNA, 87 bp, synthetic construct
  misc_feature 1..87: note = Description of sequence: Primer
  source 1..87: mol_type = other DNA
atggacgacgacgacaagttcatcttctctatcctggttctggcttaacgaagcacctcgctaaaaaaaaaaaaaaaaaaaaaaaaa

SEQ ID NO: 562 - DNA, 87 bp, synthetic construct
  misc_feature 1..87: note = Description of sequence: Primer
  source 1..87: mol_type = other DNA
atggacgacgacgacaagatccaggctaccgttatgatcatcgtttaacgaagcacctcgctaaaaaaaaaaaaaaaaaaaaaaaaa

SEQ ID NO: 563 - DNA, 87 bp, synthetic construct
  misc_feature 1..87: note = Description of sequence: Primer
  source 1..87: mol_type = other DNA
atggacgacgacgacaagaaaatgtacgctttcaccctggaatcttaacgaagcacctcgctaaaaaaaaaaaaaaaaaaaaaaaaa

SEQ ID NO: 564 - DNA, 87 bp, synthetic construct
  misc_feature 1..87: note = Description of sequence: Primer
  source 1..87: mol_type = other DNA
atggacgacgacgacaagaaatctctgaactactctggtgttaaataacgaagcacctcgctaaaaaaaaaaaaaaaaaaaaaaaaa

SEQ ID NO: 565 - DNA, 87 bp, synthetic construct
  misc_feature 1..87: note = Description of sequence: Primer
  source 1..87: mol_type = other DNA
atggacgacgacgacaagctggctgttgacggtgttctgtctgtttaacgaagcacctcgctaaaaaaaaaaaaaaaaaaaaaaaaa

SEQ ID NO: 566 - DNA, 87 bp, synthetic construct
  misc_feature 1..87: note = Description of sequence: Primer
  source 1..87: mol_type = other DNA
atggacgacgacgacaagctgctgtctctgttctctctgtggctgtaacgaagcacctcgctaaaaaaaaaaaaaaaaaaaaaaaaa

SEQ ID NO: 567 - DNA, 87 bp, synthetic construct
  misc_feature 1..87: note = Description of sequence: Primer
  source 1..87: mol_type = other DNA
atggacgacgacgacaagcgtctgctgtacccggactaccagatctaacgaagcacctcgctaaaaaaaaaaaaaaaaaaaaaaaaa

SEQ ID NO: 568 - DNA, 87 bp, synthetic construct
  misc_feature 1..87: note = Description of sequence: Primer
  source 1..87: mol_type = other DNA
atggacgacgacgacaagaccatgcactctctgaccatccagatgtaacgaagcacctcgctaaaaaaaaaaaaaaaaaaaaaaaaa

SEQ ID NO: 569 - DNA, 87 bp, synthetic construct
  misc_feature 1..87: note = Description of sequence: Primer
  source 1..87: mol_type = other DNA
atggacgacgacgacaaggttgctgctaacatcgttctgaccgtttaacgaagcacctcgctaaaaaaaaaaaaaaaaaaaaaaaaa

SEQ ID NO: 570 - DNA, 87 bp, synthetic construct
  misc_feature 1..87: note = Description of sequence: Primer
  source 1..87: mol_type = other DNA
atggacgacgacgacaagtgcctgggtcacaaccacaaagaagtttaacgaagcacctcgctaaaaaaaaaaaaaaaaaaaaaaaaa

SEQ ID NO: 571 - DNA, 90 bp, synthetic construct
  misc_feature 1..90: note = Description of sequence: Primer
  source 1..90: mol_type = other DNA
atggacgacgacgacaagaaaatcgctgacccgatctgcaccttcatctaacgaagcacctcgctaaaaaaaaaaaaaaaaaaaaaaaaa

SEQ ID NO: 572 - DNA, 90 bp, synthetic construct
  misc_feature 1..90: note = Description of sequence: Primer
  source 1..90: mol_type = other DNA
atggacgacgacgacaagaaaatgtacgctttcaccctggaatctgtttaacgaagcacctcgctaaaaaaaaaaaaaaaaaaaaaaaaa

SEQ ID NO: 573 - DNA, 90 bp, synthetic construct
  misc_feature 1..90: note = Description of sequence: Primer
  source 1..90: mol_type = other DNA
atggacgacgacgacaagctgctgatcgacctgacctctttcctgctgtaacgaagcacctcgctaaaaaaaaaaaaaaaaaaaaaaaaa

SEQ ID NO: 574 - DNA, 87 bp, synthetic construct
  misc_feature 1..87: note = Description of sequence: Primer
  source 1..87: mol_type = other DNA
atggacgacgacgacaagctgctgtctatcctgtgcatctgggtttaacgaagcacctcgctaaaaaaaaaaaaaaaaaaaaaaaaa

SEQ ID NO: 575 - DNA, 90 bp, synthetic construct
  misc_feature 1..90: note = Description of sequence: Primer
  source 1..90: mol_type = other DNA
atggacgacgacgacaagtctctgtacaacaccgttgctaccctgtactaacgaagcacctcgctaaaaaaaaaaaaaaaaaaaaaaaaa

SEQ ID NO: 576 - DNA, 90 bp, synthetic construct
  misc_feature 1..90: note = Description of sequence: Primer
  source 1..90: mol_type = other DNA
atggacgacgacgacaagttcctgggtaaaatctggccgtcttacaaataacgaagcacctcgctaaaaaaaaaaaaaaaaaaaaaaaaa

SEQ ID NO: 577 - DNA, 87 bp, synthetic construct
  misc_feature 1..87: note = Description of sequence: Primer
  source 1..87: mol_type = other DNA
atggacgacgacgacaagctggttggtccgaccccggttaacatctaacgaagcacctcgctaaaaaaaaaaaaaaaaaaaaaaaaa

SEQ ID NO: 578 - DNA, 87 bp, synthetic construct
  misc_feature 1..87: note = Description of sequence: Primer
  source 1..87: mol_type = other DNA
atggacgacgacgacaaggctctggttgaaatctgcaccgaaatgtaacgaagcacctcgctaaaaaaaaaaaaaaaaaaaaaaaaa

SEQ ID NO: 579 - DNA, 87 bp, synthetic construct
  misc_feature 1..87: note = Description of sequence: Primer
  source 1..87: mol_type = other DNA
atggacgacgacgacaaggttatctaccagtacatggacgacctgtaacgaagcacctcgctaaaaaaaaaaaaaaaaaaaaaaaaa

SEQ ID NO: 580 - DNA, 87 bp, synthetic construct
  misc_feature 1..87: note = Description of sequence: Primer
  source 1..87: mol_type = other DNA
atggacgacgacgacaagatcctgaaagaaccggttcacggtgtttaacgaagcacctcgctaaaaaaaaaaaaaaaaaaaaaaaaa

SEQ ID NO: 581 - DNA, 87 bp, synthetic construct
  misc_feature 1..87: note = Description of sequence: Primer
  source 1..87: mol_type = other DNA
atggacgacgacgacaaggctatcatccgtatcctgcagcagctgtaacgaagcacctcgctaaaaaaaaaaaaaaaaaaaaaaaaa

SEQ ID NO: 582 - DNA, 90 bp, synthetic construct
  misc_feature 1..90: note = Description of sequence: Primer
  source 1..90: mol_type = other DNA
atggacgacgacgacaagcgtggtccgggtcgtgctttcgttaccatctaacgaagcacctcgctaaaaaaaaaaaaaaaaaaaaaaaaa

SEQ ID NO: 583 - DNA, 90 bp, synthetic construct
  misc_feature 1..90: note = Description of sequence: Primer
  source 1..90: mol_type = other DNA
atggacgacgacgacaagtctctgctgaacgctaccgacatcgctgtttaacgaagcacctcgctaaaaaaaaaaaaaaaaaaaaaaaaa

SEQ ID NO: 584 - DNA, 87 bp, synthetic construct
  misc_feature 1..87: note = Description of sequence: Primer
  source 1..87: mol_type = other DNA
atggacgacgacgacaagctgctgaacgctaccgacatcgctgtttaacgaagcacctcgctaaaaaaaaaaaaaaaaaaaaaaaaa

SEQ ID NO: 585 - DNA, 90 bp, synthetic construct
  misc_feature 1..90: note = Description of sequence: Primer
  source 1..90: mol_type = other DNA
atggacgacgacgacaagccgctgaccttcggttggtgctacaaactgtaacgaagcacctcgctaaaaaaaaaaaaaaaaaaaaaaaaa

SEQ ID NO: 586 - DNA, 90 bp, synthetic construct
  misc_feature 1..90: note = Description of sequence: Primer
  source 1..90: mol_type = other DNA
atggacgacgacgacaaggttctggaatggcgtttcgactctcgtctgtaacgaagcacctcgctaaaaaaaaaaaaaaaaaaaaaaaaa

SEQ ID NO: 587 - DNA, 87 bp, synthetic construct
  misc_feature 1..87: note = Description of sequence: Primer
  source 1..87: mol_type = other DNA
atggacgacgacgacaagggtatcctgggtttcgttttcaccctgtaacgaagcacctcgctaaaaaaaaaaaaaaaaaaaaaaaaa

SEQ ID NO: 588 - DNA, 90 bp, synthetic construct
  misc_feature 1..90: note = Description of sequence: Primer
  source 1..90: mol_type = other DNA
atggacgacgacgacaagaaactgtaccagaacccgaccacctacatctaacgaagcacctcgctaaaaaaaaaaaaaaaaaaaaaaaaa

SEQ ID NO: 589 - DNA, 90 bp, synthetic construct
  misc_feature 1..90: note = Description of sequence: Primer
  source 1..90: mol_type = other DNA
atggacgacgacgacaagcgtctgtaccagaacccgaccacctacatctaacgaagcacctcgctaaaaaaaaaaaaaaaaaaaaaaaaa

SEQ ID NO: 590 - DNA, 87 bp, synthetic construct
  misc_feature 1..87: note = Description of sequence: Primer
  source 1..87: mol_type = other DNA
atggacgacgacgacaaggctatcatggacaaaaacatcatcctgtaacgaagcacctcgctaaaaaaaaaaaaaaaaaaaaaaaaa

SEQ ID NO: 591 - DNA, 87 bp, synthetic construct
  misc_feature 1..87: note = Description of sequence: Primer
  source 1..87: mol_type = other DNA
atggacgacgacgacaagttcatgtactctgacttccacttcatctaacgaagcacctcgctaaaaaaaaaaaaaaaaaaaaaaaaa

SEQ ID NO: 592 - DNA, 90 bp, synthetic construct
  misc_feature 1..90: note = Description of sequence: Primer
  source 1..90: mol_type = other DNA
atggacgacgacgacaagaaactggttgctctgggtatcaacgctgtttaacgaagcacctcgctaaaaaaaaaaaaaaaaaaaaaaaaa

SEQ ID NO: 593 - DNA, 90 bp, synthetic construct
  misc_feature 1..90: note = Description of sequence: Primer
  source 1..90: mol_type = other DNA
atggacgacgacgacaagctgctgttcaacatcctgggtggttgggtttaacgaagcacctcgctaaaaaaaaaaaaaaaaaaaaaaaaa

SEQ ID NO: 594 - DNA, 87 bp, synthetic construct
  misc_feature 1..87: note = Description of sequence: Primer
  source 1..87: mol_type = other DNA
atggacgacgacgacaagtgcatcaacggtgtttgctggaccgtttaacgaagcacctcgctaaaaaaaaaaaaaaaaaaaaaaaaa

SEQ ID NO: 595 - DNA, 90 bp, synthetic construct
  misc_feature 1..90: note = Description of sequence: Primer
  source 1..90: mol_type = other DNA
atggacgacgacgacaagtacctgctgccgcgtcgtggtccgcgtctgtaacgaagcacctcgctaaaaaaaaaaaaaaaaaaaaaaaaa

SEQ ID NO: 596 - DNA, 90 bp, synthetic construct
  misc_feature 1..90: note = Description of sequence: Primer
  source 1..90: mol_type = other DNA
atggacgacgacgacaagtacctggttgctctgggtatcaacgctgtttaacgaagcacctcgctaaaaaaaaaaaaaaaaaaaaaaaaa

SEQ ID NO: 597 - DNA, 90 bp, synthetic construct
  misc_feature 1..90: note = Description of sequence: Primer
  source 1..90: mol_type = other DNA
atggacgacgacgacaagtacctggttgctctgggtgttaacgctgtttaacgaagcacctcgctaaaaaaaaaaaaaaaaaaaaaaaaa

SEQ ID NO: 598 - DNA, 90 bp, synthetic construct
  misc_feature 1..90: note = Description of sequence: Primer
  source 1..90: mol_type = other DNA
atggacgacgacgacaagaaactggttgctctgggtatcaacaacgtttaacgaagcacctcgctaaaaaaaaaaaaaaaaaaaaaaaaa

SEQ ID NO: 599 - DNA, 90 bp, synthetic construct
  misc_feature 1..90: note = Description of sequence: Primer
  source 1..90: mol_type = other DNA
atggacgacgacgacaagtctctggttgctctgggtatcaacgctgtttaacgaagcacctcgctaaaaaaaaaaaaaaaaaaaaaaaaa

SEQ ID NO: 600 - DNA, 90 bp, synthetic construct
  misc_feature 1..90: note = Description of sequence: Primer
  source 1..90: mol_type = other DNA
atggacgacgacgacaagaaaatcgttgctctgggtatcaacgctgtttaacgaagcacctcgctaaaaaaaaaaaaaaaaaaaaaaaaa

SEQ ID NO: 601 - DNA, 87 bp, synthetic construct
  misc_feature 1..87: note = Description of sequence: Primer
  source 1..87: mol_type = other DNA
atggacgacgacgacaagtgcctgggtggtctgctgaccatggtttaacgaagcacctcgctaaaaaaaaaaaaaaaaaaaaaaaaa

SEQ ID NO: 602 - DNA, 87 bp, synthetic construct
  misc_feature 1..87: note = Description of sequence: Primer
  source 1..87: mol_type = other DNA
atggacgacgacgacaagtacctgcagcagaactggtggaccctgtaacgaagcacctcgctaaaaaaaaaaaaaaaaaaaaaaaaa

SEQ ID NO: 603 - DNA, 87 bp, synthetic construct
  misc_feature 1..87: note = Description of sequence: Primer
  source 1..87: mol_type = other DNA
atggacgacgacgacaagtacctgctggaaatgctgtggcgtctgtaacgaagcacctcgctaaaaaaaaaaaaaaaaaaaaaaaaa

SEQ ID NO: 604 - DNA, 87 bp, synthetic construct
  misc_feature 1..87: note = Description of sequence: Primer
  source 1..87: mol_type = other DNA
atggacgacgacgacaagtacgttctggaccacctgatcgttgtttaacgaagcacctcgctaaaaaaaaaaaaaaaaaaaaaaaaa

SEQ ID NO: 605 - DNA, 87 bp, synthetic construct
  misc_feature 1..87: note = Description of sequence: Primer
  source 1..87: mol_type = other DNA
atggacgacgacgacaagggtctgtgcaccctggttgctatgctgtaacgaagcacctcgctaaaaaaaaaaaaaaaaaaaaaaaaa

SEQ ID NO: 606 - DNA, 84 bp, synthetic construct
  misc_feature 1..84: note = Description of sequence: Primer
  source 1..84: mol_type = other DNA
atggacgacgacgacaagtacctgctgccgggttggaaactgtaacgaagcacctcgctaaaaaaaaaaaaaaaaaaaaaaaaa

SEQ ID NO: 607 - DNA, 87 bp, synthetic construct
  misc_feature 1..87: note = Description of sequence: Primer
  source 1..87: mol_type = other DNA
atggacgacgacgacaagtctctgatctctggtatgtggctgctgtaacgaagcacctcgctaaaaaaaaaaaaaaaaaaaaaaaaa

SEQ ID NO: 608 - DNA, 87 bp, synthetic construct
  misc_feature 1..87: note = Description of sequence: Primer
  source 1..87: mol_type = other DNA
atggacgacgacgacaagaccctgctggctaacgttaccgctgtttaacgaagcacctcgctaaaaaaaaaaaaaaaaaaaaaaaaa

SEQ ID NO: 609 - DNA, 87 bp, synthetic construct
  misc_feature 1..87: note = Description of sequence: Primer
  source 1..87: mol_type = other DNA
atggacgacgacgacaagttcctgtacgctctggctctgctgctgtaacgaagcacctcgctaaaaaaaaaaaaaaaaaaaaaaaaa

SEQ ID NO: 610 - DNA, 87 bp, synthetic construct
  misc_feature 1..87: note = Description of sequence: Primer
  source 1..87: mol_type = other DNA
atggacgacgacgacaaggaagttaaagaaaaacacgaattcctgtaacgaagcacctcgctaaaaaaaaaaaaaaaaaaaaaaaaa

SEQ ID NO: 611 - DNA, 90 bp, synthetic construct
  misc_feature 1..90: note = Description of sequence: Primer
  source 1..90: mol_type = other DNA
atggacgacgacgacaagatcctgatgaacgaccaggaagttggtgtttaacgaagcacctcgctaaaaaaaaaaaaaaaaaaaaaaaaa

SEQ ID NO: 612 - DNA, 87 bp, synthetic construct
  misc_feature 1..87: note = Description of sequence: Primer
  source 1..87: mol_type = other DNA
atggacgacgacgacaagggtatcatctacatcatctacaaactgtaacgaagcacctcgctaaaaaaaaaaaaaaaaaaaaaaaaa

SEQ ID NO: 613 - DNA, 90 bp, synthetic construct
  misc_feature 1..90: note = Description of sequence: Primer
  source 1..90: mol_type = other DNA
atggacgacgacgacaaggaagctgctggtatcggtatcctgaccgtttaacgaagcacctcgctaaaaaaaaaaaaaaaaaaaaaaaaa

SEQ ID NO: 614 - DNA, 90 bp, synthetic construct
  misc_feature 1..90: note = Description of sequence: Primer
  source 1..90: mol_type = other DNA
atggacgacgacgacaaggaactggctggtatcggtatcctgaccgtttaacgaagcacctcgctaaaaaaaaaaaaaaaaaaaaaaaaa

SEQ ID NO: 615 - DNA, 90 bp, synthetic construct
  misc_feature 1..90: note = Description of sequence: Primer
  source 1..90: mol_type = other DNA
atggacgacgacgacaaggctctggctggtatcggtatcctgaccgtttaacgaagcacctcgctaaaaaaaaaaaaaaaaaaaaaaaaa

SEQ ID NO: 616 - DNA, 87 bp, synthetic construct
  misc_feature 1..87: note = Description of sequence: Primer
  source 1..87: mol_type = other DNA
atggacgacgacgacaaggctgctggtatcggtatcctgaccgtttaacgaagcacctcgctaaaaaaaaaaaaaaaaaaaaaaaaa

SEQ ID NO: 617 - DNA, 87 bp, synthetic construct
  misc_feature 1..87: note = Description of sequence: Primer
  source 1..87: mol_type = other DNA
atggacgacgacgacaaggctctgggtatcggtatcctgaccgtttaacgaagcacctcgctaaaaaaaaaaaaaaaaaaaaaaaaa

SEQ ID NO: 618 - DNA, 90 bp, synthetic construct
  misc_feature 1..90: note = Description of sequence: Primer
  source 1..90: mol_type = other DNA
atggacgacgacgacaagctgctggctggtatcggtaccgttccgatctaacgaagcacctcgctaaaaaaaaaaaaaaaaaaaaaaaaa

SEQ ID NO: 619 - DNA, 84 bp, synthetic construct
  misc_feature 1..84: note = Description of sequence: Primer
  source 1..84: mol_type = other DNA
atggacgacgacgacaagtgcacctctatctgctctctgtactaacgaagcacctcgctaaaaaaaaaaaaaaaaaaaaaaaaa

SEQ ID NO: 620 - DNA, 90 bp, synthetic construct
  misc_feature 1..90: note = Description of sequence: Primer
  source 1..90: mol_type = other DNA
atggacgacgacgacaagtgcggttctcacctggttgaagctctgtactaacgaagcacctcgctaaaaaaaaaaaaaaaaaaaaaaaaa

SEQ ID NO: 621 - DNA, 87 bp, synthetic construct
  misc_feature 1..87: note = Description of sequence: Primer
  source 1..87: mol_type = other DNA
atggacgacgacgacaagggttctcacctggttgaagctctgtactaacgaagcacctcgctaaaaaaaaaaaaaaaaaaaaaaaaa

SEQ ID NO: 622 - DNA, 87 bp, synthetic construct
  misc_feature 1..87: note = Description of sequence: Primer
  source 1..87: mol_type = other DNA
atggacgacgacgacaagtgcctggaactggctgaatacctgtactaacgaagcacctcgctaaaaaaaaaaaaaaaaaaaaaaaaa

SEQ ID NO: 623 - DNA, 90 bp, synthetic construct
  misc_feature 1..90: note = Description of sequence: Primer
  source 1..90: mol_type = other DNA
atggacgacgacgacaagtctaccgctaacaccaacatgttcacctactaacgaagcacctcgctaaaaaaaaaaaaaaaaaaaaaaaaa

SEQ ID NO: 624 - DNA, 90 bp, synthetic construct
  misc_feature 1..90: note = Description of sequence: Primer
  source 1..90: mol_type = other DNA
atggacgacgacgacaagaaatgcctggaactggctgaatacctgtactaacgaagcacctcgctaaaaaaaaaaaaaaaaaaaaaaaaa

SEQ ID NO: 625 - DNA, 90 bp, synthetic construct
  misc_feature 1..90: note = Description of sequence: Primer
  source 1..90: mol_type = other DNA
atggacgacgacgacaagcagcaggacaaacactacgacctgtcttactaacgaagcacctcgctaaaaaaaaaaaaaaaaaaaaaaaaa

SEQ ID NO: 626 - DNA, 90 bp, synthetic construct
  misc_feature 1..90: note = Description of sequence: Primer
  source 1..90: mol_type = other DNA
atggacgacgacgacaaggtttctgctaccgctggtaccaccgtttactaacgaagcacctcgctaaaaaaaaaaaaaaaaaaaaaaaaa

SEQ ID NO: 627 - DNA, 87 bp, synthetic construct
  misc_feature 1..87: note = Description of sequence: Primer
  source 1..87: mol_type = other DNA
atggacgacgacgacaagtctaccaaagttatcgacttccactactaacgaagcacctcgctaaaaaaaaaaaaaaaaaaaaaaaaa

SEQ ID NO: 628 - DNA, 87 bp, synthetic construct
  misc_feature 1..87: note = Description of sequence: Primer
  source 1..87: mol_type = other DNA
atggacgacgacgacaagtacctggcttgcgaacgtctgctgtactaacgaagcacctcgctaaaaaaaaaaaaaaaaaaaaaaaaa

SEQ ID NO: 629 - DNA, 87 bp, synthetic construct
  misc_feature 1..87: note = Description of sequence: Primer
  source 1..87: mol_type = other DNA
atggacgacgacgacaaggttaccgacgctgctcacctgctgatctaacgaagcacctcgctaaaaaaaaaaaaaaaaaaaaaaaaa

SEQ ID NO: 630 - DNA, 87 bp, synthetic construct
  misc_feature 1..87: note = Description of sequence: Primer
  source 1..87: mol_type = other DNA
atggacgacgacgacaagccgaccgaaaaaggtgctaacgaatactaacgaagcacctcgctaaaaaaaaaaaaaaaaaaaaaaaaa

SEQ ID NO: 631 - DNA, 87 bp, synthetic construct
  misc_feature 1..87: note = Description of sequence: Primer
  source 1..87: mol_type = other DNA
atggacgacgacgacaagctgatcgacctgacctctttcctgctgtaacgaagcacctcgctaaaaaaaaaaaaaaaaaaaaaaaaa

SEQ ID NO: 632 - DNA, 90 bp, synthetic construct
  misc_feature 1..90: note = Description of sequence: Primer
  source 1..90: mol_type = other DNA
atggacgacgacgacaagaaaccgaccgaaaaaggtgctaacgaatactaacgaagcacctcgctaaaaaaaaaaaaaaaaaaaaaaaaa

SEQ ID NO: 633 - DNA, 90 bp, synthetic construct
  misc_feature 1..90: note = Description of sequence: Primer
  source 1..90: mol_type = other DNA
atggacgacgacgacaaggttgttaccgacgctgctcacctgctgatctaacgaagcacctcgctaaaaaaaaaaaaaaaaaaaaaaaaa

SEQ ID NO: 634 - DNA, 87 bp, synthetic construct
  misc_feature 1..87: note = Description of sequence: Primer
  source 1..87: mol_type = other DNA
atggacgacgacgacaagctgacctctttcctgctgtctctgttctaacgaagcacctcgctaaaaaaaaaaaaaaaaaaaaaaaaa

SEQ ID NO: 635 - DNA, 87 bp, synthetic construct
  misc_feature 1..87: note = Description of sequence: Primer
  source 1..87: mol_type = other DNA
atggacgacgacgacaagtctaccaacgttggttctaacacctactaacgaagcacctcgctaaaaaaaaaaaaaaaaaaaaaaaaa

SEQ ID NO: 636 - DNA, 90 bp, synthetic construct
  misc_feature 1..90: note = Description of sequence: Primer
  source 1..90: mol_type = other DNA
atggacgacgacgacaagtcttctaccaacgttggttctaacacctactaacgaagcacctcgctaaaaaaaaaaaaaaaaaaaaaaaaa

SEQ ID NO: 637 - DNA, 90 bp, synthetic construct
  misc_feature 1..90: note = Description of sequence: Primer
  source 1..90: mol_type = other DNA
atggacgacgacgacaagctgacctctctgaccatcctgcagctgtactaacgaagcacctcgctaaaaaaaaaaaaaaaaaaaaaaaaa

SEQ ID NO: 638 - DNA, 87 bp, synthetic construct
  misc_feature 1..87: note = Description of sequence: Primer
  source 1..87: mol_type = other DNA
atggacgacgacgacaagccgacccacgaagaacacctgttctactaacgaagcacctcgctaaaaaaaaaaaaaaaaaaaaaaaaa

SEQ ID NO: 639 - DNA, 90 bp, synthetic construct
  misc_feature 1..90: note = Description of sequence: Primer
  source 1..90: mol_type = other DNA
atggacgacgacgacaagatcccgacccacgaagaacacctgttctactaacgaagcacctcgctaaaaaaaaaaaaaaaaaaaaaaaaa

SEQ ID NO: 640 - DNA, 87 bp, synthetic construct
  misc_feature 1..87: note = Description of sequence: Primer
  source 1..87: mol_type = other DNA
atggacgacgacgacaagacctctctgaccatcctgcagctgtactaacgaagcacctcgctaaaaaaaaaaaaaaaaaaaaaaaaa

SEQ ID NO: 641 - DNA, 87 bp, synthetic construct
  misc_feature 1..87: note = Description of sequence: Primer
  source 1..87: mol_type = other DNA
atggacgacgacgacaagtctaccggtcacatgatcctggcttactaacgaagcacctcgctaaaaaaaaaaaaaaaaaaaaaaaaa

SEQ ID NO: 642 - DNA, 87 bp, synthetic construct
  misc_feature 1..87: note = Description of sequence: Primer
  source 1..87: mol_type = other DNA
atggacgacgacgacaagttcggtgaccacccgggtcactcttactaacgaagcacctcgctaaaaaaaaaaaaaaaaaaaaaaaaa

SEQ ID NO: 643 - DNA, 90 bp, synthetic construct
  misc_feature 1..90: note = Description of sequence: Primer
  source 1..90: mol_type = other DNA
atggacgacgacgacaagatctctaccggtcacatgatcctggcttactaacgaagcacctcgctaaaaaaaaaaaaaaaaaaaaaaaaa

SEQ ID NO: 644 - DNA, 84 bp, synthetic construct
  misc_feature 1..84: note = Description of sequence: Primer
  source 1..84: mol_type = other DNA
atggacgacgacgacaagttccaggactctggtctgctgtactaacgaagcacctcgctaaaaaaaaaaaaaaaaaaaaaaaaa

SEQ ID NO: 645 - DNA, 90 bp, synthetic construct
  misc_feature 1..90: note = Description of sequence: Primer
  source 1..90: mol_type = other DNA
atggacgacgacgacaagcagctgttccaggactctggtctgctgtactaacgaagcacctcgctaaaaaaaaaaaaaaaaaaaaaaaaa

SEQ ID NO: 646 - DNA, 90 bp, synthetic construct
  misc_feature 1..90: note = Description of sequence: Primer
  source 1..90: mol_type = other DNA
atggacgacgacgacaagctgtcttggcacgacgacctgacccagtactaacgaagcacctcgctaaaaaaaaaaaaaaaaaaaaaaaaa

SEQ ID NO: 647 - DNA, 87 bp, synthetic construct
  misc_feature 1..87: note = Description of sequence: Primer
  source 1..87: mol_type = other DNA
atggacgacgacgacaagtggccggacgaaggtgcttctctgtactaacgaagcacctcgctaaaaaaaaaaaaaaaaaaaaaaaaa

SEQ ID NO: 648 - DNA, 87 bp, synthetic construct
  misc_feature 1..87: note = Description of sequence: Primer
  source 1..87: mol_type = other DNA
atggacgacgacgacaaggctctggacatcgaaatcgctacctactaacgaagcacctcgctaaaaaaaaaaaaaaaaaaaaaaaaa

SEQ ID NO: 649 - DNA, 90 bp, synthetic construct
  misc_feature 1..90: note = Description of sequence: Primer
  source 1..90: mol_type = other DNA
atggacgacgacgacaagctggctctggacatcgaaatcgctacctactaacgaagcacctcgctaaaaaaaaaaaaaaaaaaaaaaaaa

SEQ ID NO: 650 - DNA, 90 bp, synthetic construct; identical to SEQ ID NO: 522
  misc_feature 1..90: note = Description of sequence: Primer
  source 1..90: mol_type = other DNA

SEQ ID NO: 651 - DNA, 84 bp, synthetic construct
  misc_feature 1..84: note = Description of sequence: Primer
  source 1..84: mol_type = other DNA
atggacgacgacgacaagggtgaacgtggtttcttctacacctaacgaagcacctcgctaaaaaaaaaaaaaaaaaaaaaaaaa

SEQ ID NO: 652 - DNA, 90 bp, synthetic construct
  misc_feature 1..90: note = Description of sequence: Primer
  source 1..90: mol_type = other DNA
atggacgacgacgacaagctggtttgcggtgaacgtggtttcttctactaacgaagcacctcgctaaaaaaaaaaaaaaaaaaaaaaaaa

SEQ ID NO: 653 - DNA, 93 bp, synthetic construct
  misc_feature 1..93: note = Description of sequence: Primer
  source 1..93: mol_type = other DNA
atggacgacgacgacaaggctctgtggggtccggacccggctgctgctttctaacgaagcacctcgctaaaaaaaaaaaaaaaaaaaaaaaaa

SEQ ID NO: 654 - DNA, 87 bp, synthetic construct
  misc_feature 1..87: note = Description of sequence: Primer
  source 1..87: mol_type = other DNA
atggacgacgacgacaagtgcaccgaactgaaactgtctgactactaacgaagcacctcgctaaaaaaaaaaaaaaaaaaaaaaaaa

SEQ ID NO: 655 - DNA, 87 bp, synthetic construct
  misc_feature 1..87: note = Description of sequence: Primer
  source 1..87: mol_type = other DNA
atggacgacgacgacaagcactctaacctgaacgacgctacctactaacgaagcacctcgctaaaaaaaaaaaaaaaaaaaaaaaaa

SEQ ID NO: 656 - DNA, 87 bp, synthetic construct
  misc_feature 1..87: note = Description of sequence: Primer
  source 1..87: mol_type = other DNA
atggacgacgacgacaagaaatcttgcctgccggcttgcgtttactaacgaagcacctcgctaaaaaaaaaaaaaaaaaaaaaaaaa

SEQ ID NO: 657 - DNA, 90 bp, synthetic construct
  misc_feature 1..90: note = Description of sequence: Primer
  source 1..90: mol_type = other DNA
atggacgacgacgacaagctggtttctgacggtggtccgaacctgtactaacgaagcacctcgctaaaaaaaaaaaaaaaaaaaaaaaaa

SEQ ID NO: 658 - DNA, 87 bp, synthetic construct
  misc_feature 1..87: note = Description of sequence: Primer
  source 1..87: mol_type = other DNA
atggacgacgacgacaaggtttctgacggtggtccgaacctgtactaacgaagcacctcgctaaaaaaaaaaaaaaaaaaaaaaaaa

SEQ ID NO: 659 - DNA, 90 bp, synthetic construct
  misc_feature 1..90: note = Description of sequence: Primer
  source 1..90: mol_type = other DNA
atggacgacgacgacaaggctctggcttcttgcatgggtctgatctactaacgaagcacctcgctaaaaaaaaaaaaaaaaaaaaaaaaa

SEQ ID NO: 660 - DNA, 87 bp, synthetic construct
  misc_feature 1..87: note = Description of sequence: Primer
  source 1..87: mol_type = other DNA
atggacgacgacgacaagggttctgaagaactgcgttctctgtactaacgaagcacctcgctaaaaaaaaaaaaaaaaaaaaaaaaa

SEQ ID NO: 661 - DNA, 87 bp, synthetic construct
  misc_feature 1..87: note = Description of sequence: Primer
  source 1..87: mol_type = other DNA
atggacgacgacgacaagttccgtgactacgttgaccgtttctactaacgaagcacctcgctaaaaaaaaaaaaaaaaaaaaaaaaa

SEQ ID NO: 662 - DNA, 87 bp, synthetic construct
  misc_feature 1..87: note = Description of sequence: Primer
  source 1..87: mol_type = other DNA
atggacgacgacgacaagcagcgtccgctggttaccatcaaaatctaacgaagcacctcgctaaaaaaaaaaaaaaaaaaaaaaaaa

SEQ ID NO: 663 - DNA, 87 bp, synthetic construct
  misc_feature 1..87: note = Description of sequence: Primer
  source 1..87: mol_type = other DNA
atggacgacgacgacaagatctctgaacgtatcctgtctacctactaacgaagcacctcgctaaaaaaaaaaaaaaaaaaaaaaaaa

SEQ ID NO: 664 - DNA, 87 bp, synthetic construct
  misc_feature 1..87: note = Description of sequence: Primer
  source 1..87: mol_type = other DNA
atggacgacgacgacaagcgtcgtggttgggaagttctgaaatactaacgaagcacctcgctaaaaaaaaaaaaaaaaaaaaaaaaa

SEQ ID NO: 665 - DNA, 90 bp, synthetic construct
  misc_feature 1..90: note = Description of sequence: Primer
  source 1..90: mol_type = other DNA
atggacgacgacgacaagatggctctgtggatgcgtctgctgccgctgtaacgaagcacctcgctaaaaaaaaaaaaaaaaaaaaaaaaa

SEQ ID NO: 666 - DNA, 90 bp, synthetic construct
  misc_feature 1..90: note = Description of sequence: Primer
  source 1..90: mol_type = other DNA
atggacgacgacgacaagtggatgcgtctgctgccgctgctggctctgtaacgaagcacctcgctaaaaaaaaaaaaaaaaaaaaaaaaa

SEQ ID NO: 667 - DNA, 84 bp, synthetic construct
  misc_feature 1..84: note = Description of sequence: Primer
  source 1..84: mol_type = other DNA
atggacgacgacgacaagtggatgcgtctgctgccgctgctgtaacgaagcacctcgctaaaaaaaaaaaaaaaaaaaaaaaaa

SEQ ID NO: 668 - DNA, 84 bp, synthetic construct
  misc_feature 1..84: note = Description of sequence: Primer
  source 1..84: mol_type = other DNA
atggacgacgacgacaagctgtggatgcgtctgctgccgctgtaacgaagcacctcgctaaaaaaaaaaaaaaaaaaaaaaaaa

SEQ ID NO: 669 - DNA, 84 bp, synthetic construct
  misc_feature 1..84: note = Description of sequence: Primer
  source 1..84: mol_type = other DNA
atggacgacgacgacaagtctctgcagaaacgtggtatcgtttaacgaagcacctcgctaaaaaaaaaaaaaaaaaaaaaaaaa

SEQ ID NO: 670 - DNA, 84 bp, synthetic construct
  misc_feature 1..84: note = Description of sequence: Primer
  source 1..84: mol_type = other DNA
atggacgacgacgacaagatggctctgtggatgcgtctgctgtaacgaagcacctcgctaaaaaaaaaaaaaaaaaaaaaaaaa

SEQ ID NO: 671 - DNA, 84 bp, synthetic construct
  misc_feature 1..84: note = Description of sequence: Primer
  source 1..84: mol_type = other DNA
atggacgacgacgacaagatgatgatcgctcgtttcaaaatgtaacgaagcacctcgctaaaaaaaaaaaaaaaaaaaaaaaaa

SEQ ID NO: 672 - DNA, 87 bp, synthetic construct
  misc_feature 1..87: note = Description of sequence: Primer
  source 1..87: mol_type = other DNA
atggacgacgacgacaagatgatgatcgctcgtttcaaaatgttctaacgaagcacctcgctaaaaaaaaaaaaaaaaaaaaaaaaa

SEQ ID NO: 673 - DNA, 87 bp, synthetic construct
  misc_feature 1..87: note = Description of sequence: Primer
  source 1..87: mol_type = other DNA
atggacgacgacgacaagatgtctcgtaaacacaaatggaaactgtaacgaagcacctcgctaaaaaaaaaaaaaaaaaaaaaaaaa

SEQ ID NO: 674 - DNA, 90 bp, synthetic construct
  misc_feature 1..90: note = Description of sequence: Primer
  source 1..90: mol_type = other DNA
atggacgacgacgacaagctgatgtctcgtaaacacaaatggaaactgtaacgaagcacctcgctaaaaaaaaaaaaaaaaaaaaaaaaa

SEQ ID NO: 675 - DNA, 87 bp, synthetic construct
  misc_feature 1..87: note = Description of sequence: Primer
  source 1..87: mol_type = other DNA
atggacgacgacgacaagtctctgaaaaaaggtgctgctgctctgtaacgaagcacctcgctaaaaaaaaaaaaaaaaaaaaaaaaa

SEQ ID NO: 676 - DNA, 90 bp, synthetic construct
  misc_feature 1..90: note = Description of sequence: Primer
  source 1..90: mol_type = other DNA
atggacgacgacgacaagttctctctgaaaaaaggtgctgctgctctgtaacgaagcacctcgctaaaaaaaaaaaaaaaaaaaaaaaaa

SEQ ID NO: 677 - DNA, 84 bp, synthetic construct
  misc_feature 1..84: note = Description of sequence: Primer
  source 1..84: mol_type = other DNA
atggacgacgacgacaagcacccgcgttacttcaaccagctgtaacgaagcacctcgctaaaaaaaaaaaaaaaaaaaaaaaaa

SEQ ID NO: 678 - DNA, 84 bp, synthetic construct
  misc_feature 1..84: note = Description of sequence: Primer
  source 1..84: mol_type = other DNA
atggacgacgacgacaagctgatgcactgccagaccaccctgtaacgaagcacctcgctaaaaaaaaaaaaaaaaaaaaaaaaa

SEQ ID NO: 679 - DNA, 90 bp, synthetic construct
  misc_feature 1..90: note = Description of sequence: Primer
  source 1..90: mol_type = other DNA
atggacgacgacgacaaggctatgatgatcgctcgtttcaaaatgttctaacgaagcacctcgctaaaaaaaaaaaaaaaaaaaaaaaaa

SEQ ID NO: 680 - DNA, 90 bp, synthetic construct
  misc_feature 1..90: note = Description of sequence: Primer
  source 1..90: mol_type = other DNA
atggacgacgacgacaagatgtctcgtctgtctaaagttgctccggtttaacgaagcacctcgctaaaaaaaaaaaaaaaaaaaaaaaaa

SEQ ID NO: 681 - DNA, 90 bp, synthetic construct
  misc_feature 1..90: note = Description of sequence: Primer
  source 1..90: mol_type = other DNA
atggacgacgacgacaagatggctgctctgccgcgtctgatcgctttctaacgaagcacctcgctaaaaaaaaaaaaaaaaaaaaaaaaa

SEQ ID NO: 682 - DNA, 84 bp, synthetic construct
  misc_feature 1..84: note = Description of sequence: Primer
  source 1..84: mol_type = other DNA
atggacgacgacgacaagatgatcgctcgtttcaaaatgttctaacgaagcacctcgctaaaaaaaaaaaaaaaaaaaaaaaaa

SEQ ID NO: 683 - DNA, 84 bp, synthetic construct
  misc_feature 1..84: note = Description of sequence: Primer
  source 1..84: mol_type = other DNA
atggacgacgacgacaagaccctgaaaaaaatgcgtgaaatctaacgaagcacctcgctaaaaaaaaaaaaaaaaaaaaaaaaa

SEQ ID NO: 684 - DNA, 90 bp, synthetic construct
  misc_feature 1..90: note = Description of sequence: Primer
  source 1..90: mol_type = other DNA
atggacgacgacgacaaggaagctaaacagaaaggtttcgttccgttctaacgaagcacctcgctaaaaaaaaaaaaaaaaaaaaaaaaa

SEQ ID NO: 685 - DNA, 87 bp, synthetic construct
  misc_feature 1..87: note = Description of sequence: Primer
  source 1..87: mol_type = other DNA
atggacgacgacgacaagcgtatgatggaatacggtaccaccatgtaacgaagcacctcgctaaaaaaaaaaaaaaaaaaaaaaaaa

SEQ ID NO: 686 - DNA, 90 bp, synthetic construct
  misc_feature 1..90: note = Description of sequence: Primer
  source 1..90: mol_type = other DNA
atggacgacgacgacaaggaagttaaagaaaaaggtatggctgctctgtaacgaagcacctcgctaaaaaaaaaaaaaaaaaaaaaaaaa

SEQ ID NO: 687 - DNA, 87 bp, synthetic construct
  misc_feature 1..87: note = Description of sequence: Primer
  source 1..87: mol_type = other DNA
atggacgacgacgacaaggaagttaaagaaaaaggtatggctgcttaacgaagcacctcgctaaaaaaaaaaaaaaaaaaaaaaaaa

SEQ ID NO: 688 - DNA, 90 bp, synthetic construct
  misc_feature 1..90: note = Description of sequence: Primer
  source 1..90: mol_type = other DNA
atggacgacgacgacaagtacgctatgatgatcgctcgtttcaaaatgtaacgaagcacctcgctaaaaaaaaaaaaaaaaaaaaaaaaa

SEQ ID NO: 689 - DNA, 90 bp, synthetic construct
  misc_feature 1..90: note = Description of sequence: Primer
  source 1..90: mol_type = other DNA
atggacgacgacgacaagaacccgcacaaaatgatgggtgttccgctgtaacgaagcacctcgctaaaaaaaaaaaaaaaaaaaaaaaaa

SEQ ID NO: 690 - DNA, 84 bp, synthetic construct
  misc_feature 1..84: note = Description of sequence: Primer
  source 1..84: mol_type = other DNA
atggacgacgacgacaagtctcgtaaacacaaatggaaactgtaacgaagcacctcgctaaaaaaaaaaaaaaaaaaaaaaaaa

SEQ ID NO: 691 - DNA, 87 bp, synthetic construct
  misc_feature 1..87: note = Description of sequence: Primer
  source 1..87: mol_type = other DNA
atggacgacgacgacaagttccagcaggacaaacactacgacctgtaacgaagcacctcgctaaaaaaaaaaaaaaaaaaaaaaaaa

SEQ ID NO: 692 - DNA, 87 bp, synthetic construct
  misc_feature 1..87: note = Description of sequence: Primer
  source 1..87: mol_type = other DNA
atggacgacgacgacaagtacgctttcctgcacgctaccgacctgtaacgaagcacctcgctaaaaaaaaaaaaaaaaaaaaaaaaa

SEQ ID NO: 693 - DNA, 87 bp, synthetic construct
  misc_feature 1..87: note = Description of sequence: Primer
  source 1..87: mol_type = other DNA
atggacgacgacgacaagttctctctgaaaaaaggtgctgctgcttaacgaagcacctcgctaaaaaaaaaaaaaaaaaaaaaaaaa

SEQ ID NO: 694 - DNA, 84 bp, synthetic construct
  misc_feature 1..84: note = Description of sequence: Primer
  source 1..84: mol_type = other DNA
atggacgacgacgacaagtctctgaaaaaaggtgctgctgcttaacgaagcacctcgctaaaaaaaaaaaaaaaaaaaaaaaaa

SEQ ID NO: 695 - DNA, 87 bp, synthetic construct
  misc_feature 1..87: note = Description of sequence: Primer
  source 1..87: mol_type = other DNA
atggacgacgacgacaagaccctgaaaaaaatgcgtgaaatcatctaacgaagcacctcgctaaaaaaaaaaaaaaaaaaaaaaaaa

SEQ ID NO: 696 - DNA, 87 bp, synthetic construct
  misc_feature 1..87: note = Description of sequence: Primer
  source 1..87: mol_type = other DNA
atggacgacgacgacaaggaacgtatgtctcgtctgtctaaagtttaacgaagcacctcgctaaaaaaaaaaaaaaaaaaaaaaaaa

SEQ ID NO: 697 - DNA, 87 bp, synthetic construct
  misc_feature 1..87: note = Description of sequence: Primer
  source 1..87: mol_type = other DNA
atggacgacgacgacaagtacgctaaatggaaactgtgctctgcttaacgaagcacctcgctaaaaaaaaaaaaaaaaaaaaaaaaa

SEQ ID NO: 698 - DNA, 87 bp, synthetic construct
  misc_feature 1..87: note = Description of sequence: Primer
  source 1..87: mol_type = other DNA
atggacgacgacgacaaggctgctaaaatgtacgctttcaccctgtaacgaagcacctcgctaaaaaaaaaaaaaaaaaaaaaaaaa

SEQ ID NO: 699 - DNA, 87 bp, synthetic construct
  misc_feature 1..87: note = Description of sequence: Primer
  source 1..87: mol_type = other DNA
atggacgacgacgacaagtgcccgcgtgaacgtccggaagaactgtaacgaagcacctcgctaaaaaaaaaaaaaaaaaaaaaaaaa

SEQ ID NO: 700 - DNA, 84 bp, synthetic construct
  misc_feature 1..84: note = Description of sequence: Primer
  source 1..84: mol_type = other DNA
atggacgacgacgacaagtacgcttacgctaaatggaaactgtaacgaagcacctcgctaaaaaaaaaaaaaaaaaaaaaaaaa

SEQ ID NO: 701 - DNA, 84 bp, synthetic construct
  misc_feature 1..84: note = Description of sequence: Primer
  source 1..84: mol_type = other DNA
atggacgacgacgacaagttcctgctgtctctgttctctctgtaacgaagcacctcgctaaaaaaaaaaaaaaaaaaaaaaaaa

SEQ ID NO: 702 - DNA, 90 bp, synthetic construct
  misc_feature 1..90: note = Description of sequence: Primer
  source 1..90: mol_type = other DNA
atggacgacgacgacaagtctgttcgtgctgctttcgttcacgctctgtaacgaagcacctcgctaaaaaaaaaaaaaaaaaaaaaaaaa

SEQ ID NO: 703 - DNA, 84 bp, synthetic construct
  misc_feature 1..84: note = Description of sequence: Primer
  source 1..84: mol_type = other DNA
atggacgacgacgacaagaacgcttctgttcgtgctgctttctaacgaagcacctcgctaaaaaaaaaaaaaaaaaaaaaaaaa

SEQ ID NO: 704 - DNA, 84 bp, synthetic construct
  misc_feature 1..84: note = Description of sequence: Primer
  source 1..84: mol_type = other DNA
atggacgacgacgacaagcactctctgcacatctggtctctgtaacgaagcacctcgctaaaaaaaaaaaaaaaaaaaaaaaaa

SEQ ID NO: 705 - DNA, 84 bp, synthetic construct
  misc_feature 1..84: note = Description of sequence: Primer
  source 1..84: mol_type = other DNA
atggacgacgacgacaaggaagttctgaaacgtgaaccgctgtaacgaagcacctcgctaaaaaaaaaaaaaaaaaaaaaaaaa

SEQ ID NO: 706 - DNA, 87 bp, synthetic construct
  misc_feature 1..87: note = Description of sequence: Primer
  source 1..87: mol_type = other DNA
atggacgacgacgacaagctgaaccacctgaaagctaccccgatctaacgaagcacctcgctaaaaaaaaaaaaaaaaaaaaaaaaa

SEQ ID NO: 707 - DNA, 84 bp, synthetic construct
  misc_feature 1..84: note = Description of sequence: Primer
  source 1..84: mol_type = other DNA
atggacgacgacgacaagatcctgaaactgcaggttttcctgtaacgaagcacctcgctaaaaaaaaaaaaaaaaaaaaaaaaa

SEQ ID NO: 708 - DNA, 87 bp, synthetic construct
  misc_feature 1..87: note = Description of sequence: Primer
  source 1..87: mol_type = other DNA
atggacgacgacgacaagatgggtatcctgaaactgcaggttttctaacgaagcacctcgctaaaaaaaaaaaaaaaaaaaaaaaaa

SEQ ID NO: 709 - DNA, 90 bp, synthetic construct
  misc_feature 1..90: note = Description of sequence: Primer
  source 1..90: mol_type = other DNA
atggacgacgacgacaagatgggtatcctgaaactgcaggttttcctgtaacgaagcacctcgctaaaaaaaaaaaaaaaaaaaaaaaaa

SEQ ID NO: 710 - DNA, 87 bp, synthetic construct
  misc_feature 1..87: note = Description of sequence: Primer
  source 1..87: mol_type = other DNA
atggacgacgacgacaagaacacctacggtaaacgtaacgctgtttaacgaagcacctcgctaaaaaaaaaaaaaaaaaaaaaaaaa

SEQ ID NO: 711 - DNA, 84 bp, synthetic construct
  misc_feature 1..84: note = Description of sequence: Primer
  source 1..84: mol_type = other DNA
atggacgacgacgacaagttcctgcaccgtaacggtgttctgtaacgaagcacctcgctaaaaaaaaaaaaaaaaaaaaaaaaa

SEQ ID NO: 712 - DNA, 84 bp, synthetic construct
  misc_feature 1..84: note = Description of sequence: Primer
  source 1..84: mol_type = other DNA
atggacgacgacgacaagtacctgaaaaccaacctgttcctgtaacgaagcacctcgctaaaaaaaaaaaaaaaaaaaaaaaaa

SEQ ID NO: 713 - DNA, 84 bp, synthetic construct
  misc_feature 1..84: note = Description of sequence: Primer
  source 1..84: mol_type = other DNA
atggacgacgacgacaagaacctgatcttcaaatggatcctgtaacgaagcacctcgctaaaaaaaaaaaaaaaaaaaaaaaaa

SEQ ID NO: 714 - DNA, 84 bp, synthetic construct
  misc_feature 1..84: note = Description of sequence: Primer
  source 1..84: mol_type = other DNA
atggacgacgacgacaagtacgttatggttaccgctgctctgtaacgaagcacctcgctaaaaaaaaaaaaaaaaaaaaaaaaa

SEQ ID NO: 715 - DNA, 90 bp, synthetic construct
  misc_feature 1..90: note = Description of sequence: Primer
  source 1..90: mol_type = other DNA
atggacgacgacgacaagaccctgtctttccgtctgctgtgcgctctgtaacgaagcacctcgctaaaaaaaaaaaaaaaaaaaaaaaaa

SEQ ID NO: 716 - DNA, 90 bp, synthetic construct
  misc_feature 1..90: note = Description of sequence: Primer
  source 1..90: mol_type = other DNA
atggacgacgacgacaagtacctgaaaaccaacctgttcctgttcctgtaacgaagcacctcgctaaaaaaaaaaaaaaaaaaaaaaaaa

SEQ ID NO: 717 - DNA, 87 bp, synthetic construct
  misc_feature 1..87: note = Description of sequence: Primer
  source 1..87: mol_type = other DNA
atggacgacgacgacaagtacctgaaaaccaacctgttcctgttctaacgaagcacctcgctaaaaaaaaaaaaaaaaaaaaaaaaa

SEQ ID NO: 718 - DNA, 84 bp, synthetic construct
  misc_feature 1..84: note = Description of sequence: Primer
  source 1..84: mol_type = other DNA
atggacgacgacgacaagtctttccgtctgctgtgcgctctgtaacgaagcacctcgctaaaaaaaaaaaaaaaaaaaaaaaaa

SEQ ID NO: 719 - DNA, 87 bp, synthetic construct
  misc_feature 1..87: note = Description of sequence: Primer
  source 1..87: mol_type = other DNA
atggacgacgacgacaagaccctgcaccgtctgacctggtctttctaacgaagcacctcgctaaaaaaaaaaaaaaaaaaaaaaaaa

SEQ ID NO: 720 - DNA, 90 bp, synthetic construct
  misc_feature 1..90: note = Description of sequence: Primer
  source 1..90: mol_type = other DNA
atggacgacgacgacaagtgcggtatggacaaattctctatcaccctgtaacgaagcacctcgctaaaaaaaaaaaaaaaaaaaaaaaaa

SEQ ID NO: 721 - DNA, 84 bp, synthetic construct
  misc_feature 1..84: note = Description of sequence: Primer
  source 1..84: mol_type = other DNA
atggacgacgacgacaagtgcggtatggacaaattctctatctaacgaagcacctcgctaaaaaaaaaaaaaaaaaaaaaaaaa

SEQ ID NO: 722 - DNA, 87 bp, synthetic construct
  misc_feature 1..87: note = Description of sequence: Primer
  source 1..87: mol_type = other DNA
atggacgacgacgacaagaacctgatcttcaaatggaaatctatctaacgaagcacctcgctaaaaaaaaaaaaaaaaaaaaaaaaa

SEQ ID NO: 723 - DNA, 90 bp, synthetic construct
  misc_feature 1..90: note = Description of sequence: Primer
  source 1..90: mol_type = other DNA
atggacgacgacgacaagtggccgtgcaacggtcgtatcctgtgcctgtaacgaagcacctcgctaaaaaaaaaaaaaaaaaaaaaaaaa

SEQ ID NO: 724 - DNA, 87 bp, synthetic construct
  misc_feature 1..87: note = Description of sequence: Primer
  source 1..87: mol_type = other DNA
atggacgacgacgacaaggttctgctggaaaaaaaatctccgctgtaacgaagcacctcgctaaaaaaaaaaaaaaaaaaaaaaaaa

SEQ ID NO: 725 - DNA, 84 bp, synthetic construct
  misc_feature 1..84: note = Description of sequence: Primer
  source 1..84: mol_type = other DNA
atggacgacgacgacaagttcctggttcgttctttctacctgtaacgaagcacctcgctaaaaaaaaaaaaaaaaaaaaaaaaa

SEQ ID NO: 726 - DNA, 84 bp, synthetic construct
  misc_feature 1..84: note = Description of sequence: Primer
  source 1..84: mol_type = other DNA
atggacgacgacgacaagcacctgcgtaaccgtgaccgtctgtaacgaagcacctcgctaaaaaaaaaaaaaaaaaaaaaaaaa

SEQ ID NO: 727 - DNA, 84 bp, synthetic construct
  misc_feature 1..84: note = Description of sequence: Primer
  source 1..84: mol_type = other DNA
atggacgacgacgacaagtctccgatgcgttctgttctgctgtaacgaagcacctcgctaaaaaaaaaaaaaaaaaaaaaaaaa

SEQ ID NO: 728 - DNA, 87 bp, synthetic construct
  misc_feature 1..87: note = Description of sequence: Primer
  source 1..87: mol_type = other DNA
atggacgacgacgacaaggctgctctgcagcgtctggctgctgtttaacgaagcacctcgctaaaaaaaaaaaaaaaaaaaaaaaaa

SEQ ID NO: 729 - DNA, 84 bp, synthetic construct
  misc_feature 1..84: note = Description of sequence: Primer
  source 1..84: mol_type = other DNA
atggacgacgacgacaagctgccggctcgtacctctccgatgtaacgaagcacctcgctaaaaaaaaaaaaaaaaaaaaaaaaa

SEQ ID NO: 730 - DNA, 84 bp, synthetic construct
  misc_feature 1..84: note = Description of sequence: Primer
  source 1..84: mol_type = other DNA
atggacgacgacgacaagctgctggaaaaaaaatctccgctgtaacgaagcacctcgctaaaaaaaaaaaaaaaaaaaaaaaaa

SEQ ID NO: 731 - DNA, 84 bp, synthetic construct
  misc_feature 1..84: note = Description of sequence: Primer
  source 1..84: mol_type = other DNA
atggacgacgacgacaaggacaaagaacgtctggctgctctgtaacgaagcacctcgctaaaaaaaaaaaaaaaaaaaaaaaaa

SEQ ID NO: 732 - DNA, 84 bp, synthetic construct
  misc_feature 1..84: note = Description of sequence: Primer
  source 1..84: mol_type = other DNA
atggacgacgacgacaagcacgctcgtatcaaactgaaagtttaacgaagcacctcgctaaaaaaaaaaaaaaaaaaaaaaaaa

SEQ ID NO: 733 - DNA, 84 bp, synthetic construct
  misc_feature 1..84: note = Description of sequence: Primer
  source 1..84: mol_type = other DNA
atggacgacgacgacaagtaccgtggtcgttcttgcccgatctaacgaagcacctcgctaaaaaaaaaaaaaaaaaaaaaaaaa

SEQ ID NO: 734 - DNA, 90 bp, synthetic construct
  misc_feature 1..90: note = Description of sequence: Primer
  source 1..90: mol_type = other DNA
atggacgacgacgacaagcagcaggacaaagaacgtctggctgctctgtaacgaagcacctcgctaaaaaaaaaaaaaaaaaaaaaaaaa

SEQ ID NO: 735 - DNA, 87 bp, synthetic construct
  misc_feature 1..87: note = Description of sequence: Primer
  source 1..87: mol_type = other DNA
atggacgacgacgacaaggaactgccggctcgtacctctccgatgtaacgaagcacctcgctaaaaaaaaaaaaaaaaaaaaaaaaa

SEQ ID NO: 736 - DNA, 87 bp, synthetic construct
  misc_feature 1..87: note = Description of sequence: Primer
  source 1..87: mol_type = other DNA
atggacgacgacgacaagtgctaccgtggtcgttcttgcccgatctaacgaagcacctcgctaaaaaaaaaaaaaaaaaaaaaaaaa

SEQ ID NO: 737 - DNA, 84 bp, synthetic construct
  misc_feature 1..84: note = Description of sequence: Primer
  source 1..84: mol_type = other DNA
atggacgacgacgacaagcgtccgcgtgaccgttctggtctgtaacgaagcacctcgctaaaaaaaaaaaaaaaaaaaaaaaaa

SEQ ID NO: 738 - DNA, 90 bp, synthetic construct
  misc_feature 1..90: note = Description of sequence: Primer
  source 1..90: mol_type = other DNA
atggacgacgacgacaagtctccgatgcgttctgttctgctgaccctgtaacgaagcacctcgctaaaaaaaaaaaaaaaaaaaaaaaaa

SEQ ID NO: 739 - DNA, 84 bp, synthetic construct
  misc_feature 1..84: note = Description of sequence: Primer
  source 1..84: mol_type = other DNA
atggacgacgacgacaaggctctgcagcgtctggctgctgtttaacgaagcacctcgctaaaaaaaaaaaaaaaaaaaaaaaaa

SEQ ID NO: 740 - DNA, 90 bp, synthetic construct
  misc_feature 1..90: note = Description of sequence: Primer
  source 1..90: mol_type = other DNA
atggacgacgacgacaaggctgctctgcagcgtctggctgctgttctgtaacgaagcacctcgctaaaaaaaaaaaaaaaaaaaaaaaaa

SEQ ID NO: 741 - DNA, 87 bp, synthetic construct
  misc_feature 1..87: note = Description of sequence: Primer
  source 1..87: mol_type = other DNA
atggacgacgacgacaagcacctgcgtaaccgtgaccgtctggcttaacgaagcacctcgctaaaaaaaaaaaaaaaaaaaaaaaaa

SEQ ID NO: 742 - DNA, 84 bp, synthetic construct
  misc_feature 1..84: note = Description of sequence: Primer
  source 1..84: mol_type = other DNA
atggacgacgacgacaagctggctaaagaatggcaggctctgtaacgaagcacctcgctaaaaaaaaaaaaaaaaaaaaaaaaa

SEQ ID NO: 743 - DNA, 87 bp, synthetic construct
  misc_feature 1..87: note = Description of sequence: Primer
  source 1..87: mol_type = other DNA
atggacgacgacgacaagcaggacaaagaacgtctggctgctctgtaacgaagcacctcgctaaaaaaaaaaaaaaaaaaaaaaaaa

SEQ ID NO: 744 - DNA, 87 bp, synthetic construct
  misc_feature 1..87: note = Description of sequence: Primer
  source 1..87: mol_type = other DNA
atggacgacgacgacaagaacctgcagatccgtgaaacctctctgtaacgaagcacctcgctaaaaaaaaaaaaaaaaaaaaaaaaa

SEQ ID NO: 745 - DNA, 84 bp, synthetic construct
  misc_feature 1..84: note = Description of sequence: Primer
  source 1..84: mol_type = other DNA
atggacgacgacgacaagctgctgaacgttaaactggctctgtaacgaagcacctcgctaaaaaaaaaaaaaaaaaaaaaaaaa

SEQ ID NO: 746 - DNA, 87 bp, synthetic construct
  misc_feature 1..87: note = Description of sequence: Primer
  source 1..87: mol_type = other DNA
atggacgacgacgacaaggaactgcgtctgcgtctggaccagctgtaacgaagcacctcgctaaaaaaaaaaaaaaaaaaaaaaaaa

SEQ ID NO: 747 - DNA, 87 bp, synthetic construct
  misc_feature 1..87: note = Description of sequence: Primer
  source 1..87: mol_type = other DNA
atggacgacgacgacaagatggaacgtcgtcgtatcacctctgcttaacgaagcacctcgctaaaaaaaaaaaaaaaaaaaaaaaaa

SEQ ID NO: 748 - DNA, 87 bp, synthetic construct
  misc_feature 1..87: note = Description of sequence: Primer
  source 1..87: mol_type = other DNA
atggacgacgacgacaagtggtaccgttctaaattcgctgacctgtaacgaagcacctcgctaaaaaaaaaaaaaaaaaaaaaaaaa

SEQ ID NO: 749 - DNA, 84 bp, synthetic construct
  misc_feature 1..84: note = Description of sequence: Primer
  source 1..84: mol_type = other DNA
atggacgacgacgacaagcacctgaaacgtaacatcgttgtttaacgaagcacctcgctaaaaaaaaaaaaaaaaaaaaaaaaa

SEQ ID NO: 750 - DNA, 84 bp, synthetic construct
  misc_feature 1..84: note = Description of sequence: Primer
  source 1..84: mol_type = other DNA
atggacgacgacgacaagtaccgtcgtcagctgcagtctctgtaacgaagcacctcgctaaaaaaaaaaaaaaaaaaaaaaaaa

SEQ ID NO: 751 - DNA, 84 bp, synthetic construct
  misc_feature 1..84: note = Description of sequence: Primer
  source 1..84: mol_type = other DNA
atggacgacgacgacaagtaccgttctaaattcgctgacctgtaacgaagcacctcgctaaaaaaaaaaaaaaaaaaaaaaaaa

SEQ ID NO: 752 - DNA, 90 bp, synthetic construct
  misc_feature 1..90: note = Description of sequence: Primer
  source 1..90: mol_type = other DNA
atggacgacgacgacaagtctaacctgcagatccgtgaaacctctctgtaacgaagcacctcgctaaaaaaaaaaaaaaaaaaaaaaaaa

SEQ ID NO: 753 - DNA, 87 bp, synthetic construct
  misc_feature 1..87: note = Description of sequence: Primer
  source 1..87: mol_type = other DNA
atggacgacgacgacaaggaactgcgtgaactgcgtctgcgtctgtaacgaagcacctcgctaaaaaaaaaaaaaaaaaaaaaaaaa

SEQ ID NO: 754 - DNA, 87 bp, synthetic construct
  misc_feature 1..87: note = Description of sequence: Primer
  source 1..87: mol_type = other DNA
atggacgacgacgacaaggactaccgtcgtcagctgcagtctctgtaacgaagcacctcgctaaaaaaaaaaaaaaaaaaaaaaaaa

SEQ ID NO: 755 - DNA, 84 bp, synthetic construct
  misc_feature 1..84: note = Description of sequence: Primer
  source 1..84: mol_type = other DNA
atggacgacgacgacaagtctgctgctcgtcgttcttacgtttaacgaagcacctcgctaaaaaaaaaaaaaaaaaaaaaaaaa

SEQ ID NO: 756 - DNA, 87 bp, synthetic construct
  misc_feature 1..87: note = Description of sequence: Primer
  source 1..87: mol_type = other DNA
atggacgacgacgacaaggaaggtcacctgaaacgtaacatcgtttaacgaagcacctcgctaaaaaaaaaaaaaaaaaaaaaaaaa

SEQ ID NO: 757 - DNA, 90 bp, synthetic construct
  misc_feature 1..90: note = Description of sequence: Primer
  source 1..90: mol_type = other DNA
atggacgacgacgacaagatggaacgtcgtcgtatcacctctgctgcttaacgaagcacctcgctaaaaaaaaaaaaaaaaaaaaaaaaa

SEQ ID NO: 758 - DNA, 84 bp, synthetic construct
  misc_feature 1..84: note = Description of sequence: Primer
  source 1..84: mol_type = other DNA
atggacgacgacgacaagctgcgtctgcgtctggaccagctgtaacgaagcacctcgctaaaaaaaaaaaaaaaaaaaaaaaaa

SEQ ID NO: 759 - DNA, 87 bp, synthetic construct
  misc_feature 1..87: note = Description of sequence: Primer
  source 1..87: mol_type = other DNA
atggacgacgacgacaaggacctggaacgtaaaatcgaatctctgtaacgaagcacctcgctaaaaaaaaaaaaaaaaaaaaaaaaa

SEQ ID NO: 760 - DNA, 84 bp, synthetic construct
  misc_feature 1..84: note = Description of sequence: Primer
  source 1..84: mol_type = other DNA
atggacgacgacgacaagctgcagatccgtgaaacctctctgtaacgaagcacctcgctaaaaaaaaaaaaaaaaaaaaaaaaa

SEQ ID NO: 761 - DNA, 90 bp, synthetic construct
  misc_feature 1..90: note = Description of sequence: Primer
  source 1..90: mol_type = other DNA
atggacgacgacgacaagcgtgaactgcgtctgcgtctggaccagctgtaacgaagcacctcgctaaaaaaaaaaaaaaaaaaaaaaaaa

SEQ ID NO: 762 - DNA, 84 bp, synthetic construct
  misc_feature 1..84: note = Description of sequence: Primer
  source 1..84: mol_type = other DNA
atggacgacgacgacaagctggctcgtatgccgccgccgctgtaacgaagcacctcgctaaaaaaaaaaaaaaaaaaaaaaaaa

SEQ ID NO: 763 - DNA, 87 bp, synthetic construct
  misc_feature 1..87: note = Description of sequence: Primer
  source 1..87: mol_type = other DNA
atggacgacgacgacaaggaaatccgtacccagtacgaagctatgtaacgaagcacctcgctaaaaaaaaaaaaaaaaaaaaaaaaa

SEQ ID NO: 764 - DNA, 84 bp, synthetic construct
  misc_feature 1..84: note = Description of sequence: Primer
  source 1..84: mol_type = other DNA
atggacgacgacgacaagggtccgggtacccgtctgtctctgtaacgaagcacctcgctaaaaaaaaaaaaaaaaaaaaaaaaa

SEQ ID NO: 765 - DNA, 87 bp, synthetic construct
  misc_feature 1..87: note = Description of sequence: Primer
  source 1..87: mol_type = other DNA
atggacgacgacgacaaggctgaccgtggtctgctgcgtgacatctaacgaagcacctcgctaaaaaaaaaaaaaaaaaaaaaaaaa

SEQ ID NO: 766 - DNA, 87 bp, synthetic construct
  misc_feature 1..87: note = Description of sequence: Primer
  source 1..87: mol_type = other DNA
atggacgacgacgacaaggctctgaaatgcaaaggtttccacgtttaacgaagcacctcgctaaaaaaaaaaaaaaaaaaaaaaaaa

SEQ ID NO: 767 - DNA, 87 bp, synthetic construct
  misc_feature 1..87: note = Description of sequence: Primer
  source 1..87: mol_type = other DNA
atggacgacgacgacaaggaactgcgttctcgttactgggctatctaacgaagcacctcgctaaaaaaaaaaaaaaaaaaaaaaaaa

SEQ ID NO: 768 - DNA, 87 bp, synthetic construct
  misc_feature 1..87: note = Description of sequence: Primer
  source 1..87: mol_type = other DNA
atggacgacgacgacaagatcctgaaaggtaaattccagaccgcttaacgaagcacctcgctaaaaaaaaaaaaaaaaaaaaaaaaa

SEQ ID NO: 769 - DNA, 87 bp, synthetic construct
  misc_feature 1..87: note = Description of sequence: Primer
  source 1..87: mol_type = other DNA
atggacgacgacgacaagcgtccgatcatccgtccggctaccctgtaacgaagcacctcgctaaaaaaaaaaaaaaaaaaaaaaaaa

SEQ ID NO: 770 - DNA, 87 bp, synthetic construct
  misc_feature 1..87: note = Description of sequence: Primer
  source 1..87: mol_type = other DNA
atggacgacgacgacaaggaactgcgttctctgtacaacaccgtttaacgaagcacctcgctaaaaaaaaaaaaaaaaaaaaaaaaa

SEQ ID NO: 771 - DNA, 84 bp, synthetic construct
  misc_feature 1..84: note = Description of sequence: Primer
  source 1..84: mol_type = other DNA
atggacgacgacgacaaggaaatctacaaacgttggatcatctaacgaagcacctcgctaaaaaaaaaaaaaaaaaaaaaaaaa

SEQ ID NO: 772 - DNA, 87 bp, synthetic construct
  misc_feature 1..87: note = Description of sequence: Primer
  source 1..87: mol_type = other DNA
atggacgacgacgacaagcgtgttaaagaaaaataccagcacctgtaacgaagcacctcgctaaaaaaaaaaaaaaaaaaaaaaaaa

SEQ ID NO: 773 - DNA, 84 bp, synthetic construct
  misc_feature 1..84: note = Description of sequence: Primer
  source 1..84: mol_type = other DNA
atggacgacgacgacaagtacctgaaagaccagcagctgctgtaacgaagcacctcgctaaaaaaaaaaaaaaaaaaaaaaaaa

SEQ ID NO: 774 - DNA, 84 bp, synthetic construct
  misc_feature 1..84: note = Description of sequence: Primer
  source 1..84: mol_type = other DNA
atggacgacgacgacaagtggccgaccgttcgtgaacgtatgtaacgaagcacctcgctaaaaaaaaaaaaaaaaaaaaaaaaa

SEQ ID NO: 775 - DNA, 84 bp, synthetic construct
  misc_feature 1..84: note = Description of sequence: Primer
  source 1..84: mol_type = other DNA
atggacgacgacgacaagttcctgaaagaaaaaggtggtctgtaacgaagcacctcgctaaaaaaaaaaaaaaaaaaaaaaaaa

SEQ ID NO: 776 - DNA, 87 bp, synthetic construct
  misc_feature 1..87: note = Description of sequence: Primer
  source 1..87: mol_type = other DNA
atggacgacgacgacaagggtccgaaagttaaacagtggccgctgtaacgaagcacctcgctaaaaaaaaaaaaaaaaaaaaaaaaa

SEQ ID NO: 777 - DNA, 87 bp, synthetic construct
  misc_feature 1..87: note = Description of sequence: Primer
  source 1..87: mol_type = other DNA
atggacgacgacgacaagttcctgcgtggtcgtgcttacggtctgtaacgaagcacctcgctaaaaaaaaaaaaaaaaaaaaaaaaa

SEQ ID NO: 778 - DNA, 84 bp, synthetic construct
  misc_feature 1..84: note = Description of sequence: Primer
  source 1..84: mol_type = other DNA
atggacgacgacgacaagcgtgctaaattcaaacagctgctgtaacgaagcacctcgctaaaaaaaaaaaaaaaaaaaaaaaaa

SEQ ID NO: 779 - DNA, 87 bp, synthetic construct
  misc_feature 1..87: note = Description of sequence: Primer
  source 1..87: mol_type = other DNA
atggacgacgacgacaagcaggctaaatggcgtctgcagaccctgtaacgaagcacctcgctaaaaaaaaaaaaaaaaaaaaaaaaa

SEQ ID NO: 780 - DNA, 84 bp, synthetic construct
  misc_feature 1..84: note = Description of sequence: Primer
  source 1..84: mol_type = other DNA
atggacgacgacgacaagtgcccgctgtctaaaatcctgctgtaacgaagcacctcgctaaaaaaaaaaaaaaaaaaaaaaaaa

SEQ ID NO: 781 - DNA, 59 bp, synthetic construct
  misc_feature 1..59: note = Description of sequence: Primer
  source 1..59: mol_type = other DNA
atggacgacgacgacaagtggtccgtcacgcaataaaaaaaaaaaaaaaaaaaaaaaaa

SEQ ID NO: 782 - DNA, 59 bp, synthetic construct
  misc_feature 1..59: note = Description of sequence: Primer
  source 1..59: mol_type = other DNA
atggacgacgacgacaagaggtgattgtgggataaaaaaaaaaaaaaaaaaaaaaaaaa

SEQ ID NO: 783 - DNA, 59 bp, synthetic construct
  misc_feature 1..59: note = Description of sequence: Primer
  source 1..59: mol_type = other DNA
atggacgacgacgacaagagcggcgttgatacttaaaaaaaaaaaaaaaaaaaaaaaaa

SEQ ID NO: 784 - DNA, 59 bp, synthetic construct
  misc_feature 1..59: note = Description of sequence: Primer
  source 1..59: mol_type = other DNA
atggacgacgacgacaagtaggtcgcgcttgcttaaaaaaaaaaaaaaaaaaaaaaaaa

SEQ ID NO: 785 - DNA, 59 bp, synthetic construct
  misc_feature 1..59: note = Description of sequence: Primer
  source 1..59: mol_type = other DNA
atggacgacgacgacaagtgttgcaggttgctgtaaaaaaaaaaaaaaaaaaaaaaaaa

SEQ ID NO: 786 - DNA, 59 bp, synthetic construct
  misc_feature 1..59: note = Description of sequence: Primer
  source 1..59: mol_type = other DNA
atggacgacgacgacaaggatgtgagttatgcagaaaaaaaaaaaaaaaaaaaaaaaaa

SEQ ID NO: 787 - DNA, 59 bp, synthetic construct
  misc_feature 1..59: note = Description of sequence: Primer
  source 1..59: mol_type = other DNA
atggacgacgacgacaagaggtatcgcagtctggaaaaaaaaaaaaaaaaaaaaaaaaa

SEQ ID NO: 788 - DNA, 59 bp, synthetic construct
  misc_feature 1..59: note = Description of sequence: Primer
  source 1..59: mol_type = other DNA
atggacgacgacgacaagtataatgggcgtctctaaaaaaaaaaaaaaaaaaaaaaaaa

SEQ ID NO: 789 - DNA, 59 bp, synthetic construct
  misc_feature 1..59: note = Description of sequence: Primer
  source 1..59: mol_type = other DNA
atggacgacgacgacaagttcggcctggtgtaacaaaaaaaaaaaaaaaaaaaaaaaaa

SEQ ID NO: 790 - DNA, 59 bp, synthetic construct
  misc_feature 1..59: note = Description of sequence: Primer
  source 1..59: mol_type = other DNA
atggacgacgacgacaagcctacgtatcgaagttaaaaaaaaaaaaaaaaaaaaaaaaa

SEQ ID NO: 791 - DNA, 59 bp, synthetic construct
  misc_feature 1..59: note = Description of sequence: Primer
  source 1..59: mol_type = other DNA
atggacgacgacgacaagtctgccttgtatccgcaaaaaaaaaaaaaaaaaaaaaaaaa

SEQ ID NO: 792 - DNA, 59 bp, synthetic construct
  misc_feature 1..59: note = Description of sequence: Primer
  source 1..59: mol_type = other DNA
atggacgacgacgacaagtgttgaccttcctcttaaaaaaaaaaaaaaaaaaaaaaaaa

SEQ ID NO: 793 - DNA, 59 bp, synthetic construct
  misc_feature 1..59: note = Description of sequence: Primer
  source 1..59: mol_type = other DNA
atggacgacgacgacaagcctcatgcagtattgaaaaaaaaaaaaaaaaaaaaaaaaaa

SEQ ID NO: 794 - DNA, 59 bp, synthetic construct
  misc_feature 1..59: note = Description of sequence: Primer
  source 1..59: mol_type = other DNA
atggacgacgacgacaagagtcatccacgcactcaaaaaaaaaaaaaaaaaaaaaaaaa

SEQ ID NO: 795 - DNA, 59 bp, synthetic construct
  misc_feature 1..59: note = Description of sequence: Primer
  source 1..59: mol_type = other DNA
atggacgacgacgacaagaggttgtcgaattcccaaaaaaaaaaaaaaaaaaaaaaaaa

SEQ ID NO: 796 - DNA, 59 bp, synthetic construct
  misc_feature 1..59: note = Description of sequence: Primer
  source 1..59: mol_type = other DNA
atggacgacgacgacaagtgcagaaaggtcatctaaaaaaaaaaaaaaaaaaaaaaaaa

SEQ ID NO: 797 - DNA, 59 bp, synthetic construct
  misc_feature 1..59: note = Description of sequence: Primer
  source 1..59: mol_type = other DNA
atggacgacgacgacaagatttccggatcaatgcaaaaaaaaaaaaaaaaaaaaaaaaa

SEQ ID NO: 798 - DNA, 59 bp, synthetic construct
  misc_feature 1..59: note = Description of sequence: Primer
  source 1..59: mol_type = other DNA
atggacgacgacgacaaggaatccgtactgattgaaaaaaaaaaaaaaaaaaaaaaaaa

SEQ ID NO: 799 - DNA, 59 bp, synthetic construct
  misc_feature 1..59: note = Description of sequence: Primer
  source 1..59: mol_type = other DNA
atggacgacgacgacaagagagcgcagacattgcaaaaaaaaaaaaaaaaaaaaaaaaa

SEQ ID NO: 800 - DNA, 59 bp, synthetic construct
  misc_feature 1..59: note = Description of sequence: Primer
  source 1..59: mol_type = other DNA
atggacgacgacgacaagtgtatgtctaccgagaaaaaaaaaaaaaaaaaaaaaaaaaa

SEQ ID NO: 801 - DNA, 59 bp, synthetic construct
  misc_feature 1..59: note = Description of sequence: Primer
  source 1..59: mol_type = other DNA
atggacgacgacgacaagtgcttcctacgttcgtaaaaaaaaaaaaaaaaaaaaaaaaa

SEQ ID NO: 802 - DNA, 59 bp, synthetic construct
  misc_feature 1..59: note = Description of sequence: Primer
  source 1..59: mol_type = other DNA
atggacgacgacgacaagtagtggggtaaaccataaaaaaaaaaaaaaaaaaaaaaaaa

SEQ ID NO: 803 - DNA, 59 bp, synthetic construct
  misc_feature 1..59: note = Description of sequence: Primer
  source 1..59: mol_type = other DNA
atggacgacgacgacaagcaaattttccatggcgaaaaaaaaaaaaaaaaaaaaaaaaa

SEQ ID NO: 804 - DNA, 59 bp, synthetic construct
  misc_feature 1..59: note = Description of sequence: Primer
  source 1..59: mol_type = other DNA
atggacgacgacgacaagaaggccttcgtttcgaaaaaaaaaaaaaaaaaaaaaaaaaa

SEQ ID NO: 805 - DNA, 59 bp, synthetic construct
  misc_feature 1..59: note = Description of sequence: Primer
  source 1..59: mol_type = other DNA
atggacgacgacgacaaggtcgagggagatatgcaaaaaaaaaaaaaaaaaaaaaaaaa

SEQ ID NO: 806 - DNA, 59 bp, synthetic construct
  misc_feature 1..59: note = Description of sequence: Primer
  source 1..59: mol_type = other DNA
atggacgacgacgacaagctggacccagacatataaaaaaaaaaaaaaaaaaaaaaaaa

SEQ ID NO: 807 - DNA, 59 bp, synthetic construct
  misc_feature 1..59: note = Description of sequence: Primer
  source 1..59: mol_type = other DNA
atggacgacgacgacaagtagtcaagcactcggcaaaaaaaaaaaaaaaaaaaaaaaaa

SEQ ID NO: 808 - DNA, 59 bp, synthetic construct
  misc_feature 1..59: note = Description of sequence: Primer
  source 1..59: mol_type = other DNA
atggacgacgacgacaagactaaggcggaaatctaaaaaaaaaaaaaaaaaaaaaaaaa

SEQ ID NO: 809 - DNA, 59 bp, synthetic construct
  misc_feature 1..59: note = Description of sequence: Primer
  source 1..59: mol_type = other DNA
atggacgacgacgacaagtttagtgccggtgataaaaaaaaaaaaaaaaaaaaaaaaaa

SEQ ID NO: 810 - DNA, 59 bp, synthetic construct
  misc_feature 1..59: note = Description of sequence: Primer
  source 1..59: mol_type = other DNA
atggacgacgacgacaagacttgcaacctaccggaaaaaaaaaaaaaaaaaaaaaaaaa

SEQ ID NO: 811 - DNA, 59 bp, synthetic construct
  misc_feature 1..59: note = Description of sequence: Primer
  source 1..59: mol_type = other DNA
atggacgacgacgacaagtctacaacggacgtgaaaaaaaaaaaaaaaaaaaaaaaaaa

SEQ ID NO: 812 - DNA, 59 bp, synthetic construct
  misc_feature 1..59: note = Description of sequence: Primer
  source 1..59: mol_type = other DNA
atggacgacgacgacaagagcaaaaccctacctaaaaaaaaaaaaaaaaaaaaaaaaaa

SEQ ID NO: 813 - DNA, 59 bp, synthetic construct
  misc_feature 1..59: note = Description of sequence: Primer
  source 1..59: mol_type = other DNA
atggacgacgacgacaagttatcatcggtatgggaaaaaaaaaaaaaaaaaaaaaaaaa

SEQ ID NO: 814 - DNA, 59 bp, synthetic construct
  misc_feature 1..59: note = Description of sequence: Primer
  source 1..59: mol_type = other DNA
atggacgacgacgacaagttctgcggatcgtcctaaaaaaaaaaaaaaaaaaaaaaaaa

SEQ ID NO: 815 - DNA, 59 bp, synthetic construct
  misc_feature 1..59: note = Description of sequence: Primer
  source 1..59: mol_type = other DNA
atggacgacgacgacaagcctgcaaaggtatagcaaaaaaaaaaaaaaaaaaaaaaaaa

SEQ ID NO: 816 - DNA, 59 bp, synthetic construct
  misc_feature 1..59: note = Description of sequence: Primer
  source 1..59: mol_type = other DNA
atggacgacgacgacaagagtactaagaagcgccaaaaaaaaaaaaaaaaaaaaaaaaa

SEQ ID NO: 817 - DNA, 59 bp, synthetic construct
  misc_feature 1..59: note = Description of sequence: Primer
  source 1..59: mol_type = other DNA
atggacgacgacgacaagttggatacttgctgagaaaaaaaaaaaaaaaaaaaaaaaaa

SEQ ID NO: 818 - DNA, 59 bp, synthetic construct
  misc_feature 1..59: note = Description of sequence: Primer
  source 1..59: mol_type = other DNA
atggacgacgacgacaaggtgtctccaaatcttcaaaaaaaaaaaaaaaaaaaaaaaaa

SEQ ID NO: 819 - DNA, 59 bp, synthetic construct
  misc_feature 1..59: note = Description of sequence: Primer
  source 1..59: mol_type = other DNA
atggacgacgacgacaaggactctattacccaccaaaaaaaaaaaaaaaaaaaaaaaaa

SEQ ID NO: 820 - DNA, 59 bp, synthetic construct
  misc_feature 1..59: note = Description of sequence: Primer
  source 1..59: mol_type = other DNA
atggacgacgacgacaagcagggattccaatatcaaaaaaaaaaaaaaaaaaaaaaaaa

SEQ ID NO: 821 - DNA, 59 bp, synthetic construct
  misc_feature 1..59: note = Description of sequence: Primer
  source 1..59: mol_type = other DNA
atggacgacgacgacaagtatgcctagacaggttaaaaaaaaaaaaaaaaaaaaaaaaa

SEQ ID NO: 822 - DNA, 59 bp, synthetic construct
  misc_feature 1..59: note = Description of sequence: Primer
  source 1..59: mol_type = other DNA
atggacgacgacgacaagagtagcattttcggtgaaaaaaaaaaaaaaaaaaaaaaaaa

SEQ ID NO: 823 - DNA, 59 bp, synthetic construct
  misc_feature 1..59: note = Description of sequence: Primer
  source 1..59: mol_type = other DNA
atggacgacgacgacaaggacgtacgattgctacaaaaaaaaaaaaaaaaaaaaaaaaa

SEQ ID NO: 824 - DNA, 59 bp, synthetic construct
  misc_feature 1..59: note = Description of sequence: Primer
  source 1..59: mol_type = other DNA
atggacgacgacgacaaggctcatgacatcgctaaaaaaaaaaaaaaaaaaaaaaaaaa

SEQ ID NO: 825 - DNA, 59 bp, synthetic construct
  misc_feature 1..59: note = Description of sequence: Primer
  source 1..59: mol_type = other DNA
atggacgacgacgacaaggccttcaattctatggaaaaaaaaaaaaaaaaaaaaaaaaa

SEQ ID NO: 826 - DNA, 59 bp, synthetic construct
  misc_feature 1..59: note = Description of sequence: Primer
  source 1..59: mol_type = other DNA
atggacgacgacgacaagctagtgttacaggtgcaaaaaaaaaaaaaaaaaaaaaaaaa

SEQ ID NO: 827 - DNA, 59 bp, synthetic construct
  misc_feature 1..59: note = Description of sequence: Primer
  source 1..59: mol_type = other DNA
atggacgacgacgacaagccgagtgctctaaccaaaaaaaaaaaaaaaaaaaaaaaaaa

SEQ ID NO: 828 - DNA, 59 bp, synthetic construct
  misc_feature 1..59: note = Description of sequence: Primer
  source 1..59: mol_type = other DNA
atggacgacgacgacaagatacgtcgtggcaacgaaaaaaaaaaaaaaaaaaaaaaaaa

SEQ ID NO: 829 - DNA, 59 bp, synthetic construct
  misc_feature 1..59: note = Description of sequence: Primer
  source 1..59: mol_type = other DNA
atggacgacgacgacaagactgaggtccgatctaaaaaaaaaaaaaaaaaaaaaaaaaa

SEQ ID NO: 830 - DNA, 59 bp, synthetic construct
  misc_feature 1..59: note = Description of sequence: Primer
  source 1..59: mol_type = other DNA
atggacgacgacgacaagttcgctcggaacatacaaaaaaaaaaaaaaaaaaaaaaaaa

SEQ ID NO: 831 - DNA, 59 bp, synthetic construct
  misc_feature 1..59: note = Description of sequence: Primer
  source 1..59: mol_type = other DNA
atggacgacgacgacaagcaactcggtagttgagaaaaaaaaaaaaaaaaaaaaaaaaa

SEQ ID NO: 832 - DNA, 59 bp, synthetic construct
  misc_feature 1..59: note = Description of sequence: Primer
  source 1..59: mol_type = other DNA
atggacgacgacgacaagtttgtttaggggttgcaaaaaaaaaaaaaaaaaaaaaaaaa

SEQ ID NO: 833 - DNA, 59 bp, synthetic construct
  misc_feature 1..59: note = Description of sequence: Primer
  source 1..59: mol_type = other DNA
atggacgacgacgacaagaagcgcatttcgttctaaaaaaaaaaaaaaaaaaaaaaaaa

SEQ ID NO: 834 - DNA, 59 bp, synthetic construct
  misc_feature 1..59: note = Description of sequence: Primer
  source 1..59: mol_type = other DNA
atggacgacgacgacaagcgagctccaactatcaaaaaaaaaaaaaaaaaaaaaaaaaa

SEQ ID NO: 835 - DNA, 59 bp, synthetic construct
  misc_feature 1..59: note = Description of sequence: Primer
  source 1..59: mol_type = other DNA
atggacgacgacgacaagaatctggacggcttgtaaaaaaaaaaaaaaaaaaaaaaaaa

SEQ ID NO: 836 - DNA, 59 bp, synthetic construct
  misc_feature 1..59: note = Description of sequence: Primer
  source 1..59: mol_type = other DNA
atggacgacgacgacaagcatttatgggtggtcaaaaaaaaaaaaaaaaaaaaaaaaaa

SEQ ID NO: 837 - DNA, 59 bp, synthetic construct
  misc_feature 1..59: note = Description of sequence: Primer
  source 1..59: mol_type = other DNA
atggacgacgacgacaagattcctgataccagagaaaaaaaaaaaaaaaaaaaaaaaaa

SEQ ID NO: 838 - DNA, 59 bp, synthetic construct
  misc_feature 1..59: note = Description of sequence: Primer
  source 1..59: mol_type = other DNA
atggacgacgacgacaagtgcaaatgcccaatacaaaaaaaaaaaaaaaaaaaaaaaaa

SEQ ID NO: 839 - DNA, 59 bp, synthetic construct
  misc_feature 1..59: note = Description of sequence: Primer
  source 1..59: mol_type = other DNA
atggacgacgacgacaagtcattgttgggtaacgaaaaaaaaaaaaaaaaaaaaaaaaa

SEQ ID NO: 840 - DNA, 59 bp, synthetic construct
  misc_feature 1..59: note = Description of sequence: Primer
  source 1..59: mol_type = other DNA
atggacgacgacgacaagcagtagccacgtgtgaaaaaaaaaaaaaaaaaaaaaaaaaa

SEQ ID NO: 841 - DNA, 59 bp, synthetic construct
  misc_feature 1..59: note = Description of sequence: Primer
  source 1..59: mol_type = other DNA
atggacgacgacgacaagagaggatgggattactaaaaaaaaaaaaaaaaaaaaaaaaa

SEQ ID NO: 842 - DNA, 59 bp, synthetic construct
  misc_feature 1..59: note = Description of sequence: Primer
  source 1..59: mol_type = other DNA
atggacgacgacgacaagctataagcgaaaccagaaaaaaaaaaaaaaaaaaaaaaaaa

SEQ ID NO: 843 - DNA, 59 bp, synthetic construct
  misc_feature 1..59: note = Description of sequence: Primer
  source 1..59: mol_type = other DNA
atggacgacgacgacaagtgacgggctgtagtttaaaaaaaaaaaaaaaaaaaaaaaaa

SEQ ID NO: 844 - DNA, 59 bp, synthetic construct
  misc_feature 1..59: note = Description of sequence: Primer
  source 1..59: mol_type = other DNA
atggacgacgacgacaagcctgtgtaagacgctgaaaaaaaaaaaaaaaaaaaaaaaaa

SEQ ID NO: 845 - DNA, 59 bp, synthetic construct
  misc_feature 1..59: note = Description of sequence: Primer
  source 1..59: mol_type = other DNA
atggacgacgacgacaagtatggagacacaaacgaaaaaaaaaaaaaaaaaaaaaaaaa

SEQ ID NO: 846 - DNA, 59 bp, synthetic construct
  misc_feature 1..59: note = Description of sequence: Primer
  source 1..59: mol_type = other DNA
atggacgacgacgacaagtacgaagggcagcataaaaaaaaaaaaaaaaaaaaaaaaaa

SEQ ID NO: 847 - DNA, 59 bp, synthetic construct
  misc_feature 1..59: note = Description of sequence: Primer
  source 1..59: mol_type = other DNA
atggacgacgacgacaagggccgatatagcaagtaaaaaaaaaaaaaaaaaaaaaaaaa

SEQ ID NO: 848 - DNA, 59 bp, synthetic construct
  misc_feature 1..59: note = Description of sequence: Primer
  source 1..59: mol_type = other DNA
atggacgacgacgacaaggagtggtcacacaggtaaaaaaaaaaaaaaaaaaaaaaaaa

SEQ ID NO: 849 - DNA, 59 bp, synthetic construct
  misc_feature 1..59: note = Description of sequence: Primer
  source 1..59: mol_type = other DNA
atggacgacgacgacaagatatgattcacggtggaaaaaaaaaaaaaaaaaaaaaaaaa

SEQ ID NO: 850 - DNA, 59 bp, synthetic construct
  misc_feature 1..59: note = Description of sequence: Primer
  source 1..59: mol_type = other DNA
atggacgacgacgacaagtgaccgagaccagagaaaaaaaaaaaaaaaaaaaaaaaaaa

SEQ ID NO: 851 - DNA, 59 bp, synthetic construct
  misc_feature 1..59: note = Description of sequence: Primer
  source 1..59: mol_type = other DNA
atggacgacgacgacaaggctatcattgagcggaaaaaaaaaaaaaaaaaaaaaaaaaa

SEQ ID NO: 852 - DNA, 59 bp, synthetic construct
  misc_feature 1..59: note = Description of sequence: Primer
  source 1..59: mol_type = other DNA
atggacgacgacgacaagtagtacgcaggttgataaaaaaaaaaaaaaaaaaaaaaaaa

SEQ ID NO: 853 - DNA, 59 bp, synthetic construct
  misc_feature 1..59: note = Description of sequence: Primer
  source 1..59: mol_type = other DNA
atggacgacgacgacaagtggatgtaacgcagcaaaaaaaaaaaaaaaaaaaaaaaaaa

SEQ ID NO: 854 - DNA, 59 bp, synthetic construct
  misc_feature 1..59: note = Description of sequence: Primer
  source 1..59: mol_type = other DNA
atggacgacgacgacaagtcaactttgagggcacaaaaaaaaaaaaaaaaaaaaaaaaa

SEQ ID NO: 855 - DNA, 59 bp, synthetic construct
  misc_feature 1..59: note = Description of sequence: Primer
  source 1..59: mol_type = other DNA
atggacgacgacgacaagctgaaaacctttgaggaaaaaaaaaaaaaaaaaaaaaaaaa

SEQ ID NO: 856 - DNA, 59 bp, synthetic construct
  misc_feature 1..59: note = Description of sequence: Primer
  source 1..59: mol_type = other DNA
atggacgacgacgacaagaaggaaatagagctccaaaaaaaaaaaaaaaaaaaaaaaaa

SEQ ID NO: 857 - DNA, 59 bp, synthetic construct
  misc_feature 1..59: note = Description of sequence: Primer
  source 1..59: mol_type = other DNA
atggacgacgacgacaaggtaaatcgccctggtaaaaaaaaaaaaaaaaaaaaaaaaaa

SEQ ID NO: 858 - DNA, 59 bp, synthetic construct
  misc_feature 1..59: note = Description of sequence: Primer
  source 1..59: mol_type = other DNA
atggacgacgacgacaaggccttgtgaagcacgaaaaaaaaaaaaaaaaaaaaaaaaaa

SEQ ID NO: 859 - DNA, 59 bp, synthetic construct
  misc_feature 1..59: note = Description of sequence: Primer
  source 1..59: mol_type = other DNA
atggacgacgacgacaagctattgaacaccgcagaaaaaaaaaaaaaaaaaaaaaaaaa

SEQ ID NO: 860 - DNA, 59 bp, synthetic construct
  misc_feature 1..59: note = Description of sequence: Primer
  source 1..59: mol_type = other DNA
atggacgacgacgacaagtagtcccgagaccagaaaaaaaaaaaaaaaaaaaaaaaaaa

SEQ ID NO: 861 - DNA, 59 bp, synthetic construct
  misc_feature 1..59: note = Description of sequence: Primer
  source 1..59: mol_type = other DNA
atggacgacgacgacaagtaccttcgaaagggccaaaaaaaaaaaaaaaaaaaaaaaaa

SEQ ID NO: 862 - DNA, 59 bp, synthetic construct
  misc_feature 1..59: note = Description of sequence: Primer
  source 1..59: mol_type = other DNA
atggacgacgacgacaagaggggaaagatgtcagaaaaaaaaaaaaaaaaaaaaaaaaa

SEQ ID NO: 863 - DNA, 59 bp, synthetic construct
  misc_feature 1..59: note = Description of sequence: Primer
  source 1..59: mol_type = other DNA
atggacgacgacgacaagcacacgagagaacaccaaaaaaaaaaaaaaaaaaaaaaaaa

SEQ ID NO: 864 - DNA, 59 bp, synthetic construct
  misc_feature 1..59: note = Description of sequence: Primer
  source 1..59: mol_type = other DNA
atggacgacgacgacaaggagaacaaacgtggcgaaaaaaaaaaaaaaaaaaaaaaaaa

SEQ ID NO: 865 - DNA, 59 bp, synthetic construct
  misc_feature 1..59: note = Description of sequence: Primer
  source 1..59: mol_type = other DNA
atggacgacgacgacaaggaaacaggaaccccacaaaaaaaaaaaaaaaaaaaaaaaaa

SEQ ID NO: 866 - DNA, 59 bp, synthetic construct
  misc_feature 1..59: note = Description of sequence: Primer
  source 1..59: mol_type = other DNA
atggacgacgacgacaaggtatgggaccaacaacaaaaaaaaaaaaaaaaaaaaaaaaa

SEQ ID NO: 867 - DNA, 59 bp, synthetic construct
  misc_feature 1..59: note = Description of sequence: Primer
  source 1..59: mol_type = other DNA
atggacgacgacgacaagagccgtgagttctccaaaaaaaaaaaaaaaaaaaaaaaaaa

SEQ ID NO: 868 - DNA, 59 bp, synthetic construct
  misc_feature 1..59: note = Description of sequence: Primer
  source 1..59: mol_type = other DNA
atggacgacgacgacaagagcacggtagtgatgaaaaaaaaaaaaaaaaaaaaaaaaaa

SEQ ID NO: 869 - DNA, 59 bp, synthetic construct
  misc_feature 1..59: note = Description of sequence: Primer
  source 1..59: mol_type = other DNA
atggacgacgacgacaagctcggcaatgaactgcaaaaaaaaaaaaaaaaaaaaaaaaa

SEQ ID NO: 870 - DNA, 59 bp, synthetic construct
  misc_feature 1..59: note = Description of sequence: Primer
  source 1..59: mol_type = other DNA
atggacgacgacgacaagttcacggggagctacaaaaaaaaaaaaaaaaaaaaaaaaaa

SEQ ID NO: 871 - DNA, 59 bp, synthetic construct
  misc_feature 1..59: note = Description of sequence: Primer
  source 1..59: mol_type = other DNA
atggacgacgacgacaagcccggaatattccctaaaaaaaaaaaaaaaaaaaaaaaaaa

SEQ ID NO: 872 - DNA, 59 bp, synthetic construct
  misc_feature 1..59: note = Description of sequence: Primer
  source 1..59: mol_type = other DNA
atggacgacgacgacaaggcatcgtttccaacggaaaaaaaaaaaaaaaaaaaaaaaaa

SEQ ID NO: 873 - DNA, 59 bp, synthetic construct
  misc_feature 1..59: note = Description of sequence: Primer
  source 1..59: mol_type = other DNA
atggacgacgacgacaagaaagtaagccaaccgcaaaaaaaaaaaaaaaaaaaaaaaaa

SEQ ID NO: 874 - DNA, 59 bp, synthetic construct
  misc_feature 1..59: note = Description of sequence: Primer
  source 1..59: mol_type = other DNA
atggacgacgacgacaagagcctagcttaatgcgaaaaaaaaaaaaaaaaaaaaaaaaa

SEQ ID NO: 875 - DNA, 59 bp, synthetic construct
  misc_feature 1..59: note = Description of sequence: Primer
  source 1..59: mol_type = other DNA
atggacgacgacgacaaggttaccctgcttcgagaaaaaaaaaaaaaaaaaaaaaaaaa

SEQ ID NO: 876 - DNA, 59 bp, synthetic construct
  misc_feature 1..59: note = Description of sequence: Primer
  source 1..59: mol_type = other DNA
atggacgacgacgacaaggagtgaaagtcaccccaaaaaaaaaaaaaaaaaaaaaaaaa

SEQ ID NO: 877 - DNA, 59 bp, synthetic construct
  misc_feature 1..59: note = Description of sequence: Primer
  source 1..59: mol_type = other DNA
atggacgacgacgacaagctagtctatttgcgacaaaaaaaaaaaaaaaaaaaaaaaaa

SEQ ID NO: 878 - DNA, 59 bp, synthetic construct
  misc_feature 1..59: note = Description of sequence: Primer
  source 1..59: mol_type = other DNA
atggacgacgacgacaaggttgggtaaacgcagcaaaaaaaaaaaaaaaaaaaaaaaaa

SEQ ID NO: 879 - DNA, 59 bp, synthetic construct
  misc_feature 1..59: note = Description of sequence: Primer
  source 1..59: mol_type = other DNA
atggacgacgacgacaagtggaactgtatagctgaaaaaaaaaaaaaaaaaaaaaaaaa

SEQ ID NO: 880 - DNA, 59 bp, synthetic construct
  misc_feature 1..59: note = Description of sequence: Primer
  source 1..59: mol_type = other DNA
atggacgacgacgacaagctgacagttcacccgtaaaaaaaaaaaaaaaaaaaaaaaaa

SEQ ID NO: 881 - DNA, 59 bp, synthetic construct
  misc_feature 1..59: note = Description of sequence: Primer
  source 1..59: mol_type = other DNA
atggacgacgacgacaagtcaactggcatgtgtaaaaaaaaaaaaaaaaaaaaaaaaaa

SEQ ID NO: 882 - DNA, 59 bp, synthetic construct
  misc_feature 1..59: note = Description of sequence: Primer
  source 1..59: mol_type = other DNA
atggacgacgacgacaagcctactggtactacgcaaaaaaaaaaaaaaaaaaaaaaaaa

SEQ ID NO: 883 - DNA, 59 bp, synthetic construct
  misc_feature 1..59: note = Description of sequence: Primer
  source 1..59: mol_type = other DNA
atggacgacgacgacaagactaggtgctcagttcaaaaaaaaaaaaaaaaaaaaaaaaa

SEQ ID NO: 884 - DNA, 59 bp, synthetic construct
  misc_feature 1..59: note = Description of sequence: Primer
  source 1..59: mol_type = other DNA
atggacgacgacgacaagaagcgtgttgctgcagaaaaaaaaaaaaaaaaaaaaaaaaa

SEQ ID NO: 885 - DNA, 59 bp, synthetic construct
  misc_feature 1..59: note = Description of sequence: Primer
  source 1..59: mol_type = other DNA
atggacgacgacgacaagcagctgagatcaggtcaaaaaaaaaaaaaaaaaaaaaaaaa

SEQ ID NO: 886 - DNA, 59 bp, synthetic construct
  misc_feature 1..59: note = Description of sequence: Primer
  source 1..59: mol_type = other DNA
atggacgacgacgacaaggcactgcttatagaagaaaaaaaaaaaaaaaaaaaaaaaaa

SEQ ID NO: 887 - DNA, 59 bp, synthetic construct
  misc_feature 1..59: note = Description of sequence: Primer
  source 1..59: mol_type = other DNA
atggacgacgacgacaagtgatgtacgattggagaaaaaaaaaaaaaaaaaaaaaaaaa

SEQ ID NO: 888 - DNA, 59 bp, synthetic construct
  misc_feature 1..59: note = Description of sequence: Primer
  source 1..59: mol_type = other DNA
atggacgacgacgacaagttcagtggacatcctcaaaaaaaaaaaaaaaaaaaaaaaaa

SEQ ID NO: 889 - DNA, 59 bp, synthetic construct
  misc_feature 1..59: note = Description of sequence: Primer
  source 1..59: mol_type = other DNA
atggacgacgacgacaaggttttaggtagggaagaaaaaaaaaaaaaaaaaaaaaaaaa

SEQ ID NO: 890 - DNA, 59 bp, synthetic construct
  misc_feature 1..59: note = Description of sequence: Primer
  source 1..59: mol_type = other DNA
atggacgacgacgacaagtgtgacaagcatgagtaaaaaaaaaaaaaaaaaaaaaaaaa

SEQ ID NO: 891 - DNA, 59 bp, synthetic construct
  misc_feature 1..59: note = Description of sequence: Primer
  source 1..59: mol_type = other DNA
atggacgacgacgacaagggattcccctaagcagaaaaaaaaaaaaaaaaaaaaaaaaa

SEQ ID NO: 892 - DNA, 59 bp, synthetic construct
  misc_feature 1..59: note = Description of sequence: Primer
  source 1..59: mol_type = other DNA
atggacgacgacgacaagcagcctatcgaccaagaaaaaaaaaaaaaaaaaaaaaaaaa

SEQ ID NO: 893 - DNA, 59 bp, synthetic construct
  misc_feature 1..59: note = Description of sequence: Primer
  source 1..59: mol_type = other DNA
atggacgacgacgacaagtatcggtagtccctctaaaaaaaaaaaaaaaaaaaaaaaaa

SEQ ID NO: 894 - DNA, 59 bp, synthetic construct
  misc_feature 1..59: note = Description of sequence: Primer
  source 1..59: mol_type = other DNA
atggacgacgacgacaagttacgcgttcagacggaaaaaaaaaaaaaaaaaaaaaaaaa

SEQ ID NO: 895 - DNA, 59 bp, synthetic construct
  misc_feature 1..59: note = Description of sequence: Primer
  source 1..59: mol_type = other DNA
atggacgacgacgacaagatgaggtagctccaccaaaaaaaaaaaaaaaaaaaaaaaaa

SEQ ID NO: 896 - DNA, 59 bp, synthetic construct
  misc_feature 1..59: note = Description of sequence: Primer
  source 1..59: mol_type = other DNA
atggacgacgacgacaagggggagtgtgtgtataaaaaaaaaaaaaaaaaaaaaaaaaa

SEQ ID NO: 897 - DNA, 59 bp, synthetic construct
  misc_feature 1..59: note = Description of sequence: Primer
  source 1..59: mol_type = other DNA
atggacgacgacgacaaggttcgggcttttcgacaaaaaaaaaaaaaaaaaaaaaaaaa

SEQ ID NO: 898 - DNA, 59 bp, synthetic construct
  misc_feature 1..59: note = Description of sequence: Primer
  source 1..59: mol_type = other DNA
atggacgacgacgacaagtgcgcagaaacctcgaaaaaaaaaaaaaaaaaaaaaaaaaa

SEQ ID NO: 899 - DNA, 59 bp, synthetic construct
  misc_feature 1..59: note = Description of sequence: Primer
  source 1..59: mol_type = other DNA
atggacgacgacgacaagcggtaccgtttcacgaaaaaaaaaaaaaaaaaaaaaaaaaa

SEQ ID NO: 900 - DNA, 59 bp, synthetic construct
  misc_feature 1..59: note = Description of sequence: Primer
  source 1..59: mol_type = other DNA
atggacgacgacgacaagccgattgatgaacgtcaaaaaaaaaaaaaaaaaaaaaaaaa

SEQ ID NO: 901 - DNA, 59 bp, synthetic construct
  misc_feature 1..59: note = Description of sequence: Primer
  source 1..59: mol_type = other DNA
atggacgacgacgacaagatcacctgaggaactaaaaaaaaaaaaaaaaaaaaaaaaaa

SEQ ID NO: 902 - DNA, 59 bp, synthetic construct
  misc_feature 1..59: note = Description of sequence: Primer
  source 1..59: mol_type = other DNA
atggacgacgacgacaagctcgaattagcgcggaaaaaaaaaaaaaaaaaaaaaaaaaa

SEQ ID NO: 903 - DNA, 59 bp, synthetic construct
  misc_feature 1..59: note = Description of sequence: Primer
  source 1..59: mol_type = other DNA
atggacgacgacgacaagatacagagacgaccataaaaaaaaaaaaaaaaaaaaaaaaa

SEQ ID NO: 904 - DNA, 59 bp, synthetic construct
  misc_feature 1..59: note = Description of sequence: Primer
  source 1..59: mol_type = other DNA
atggacgacgacgacaagggtacactgaaatggtaaaaaaaaaaaaaaaaaaaaaaaaa

SEQ ID NO: 905 - DNA, 59 bp, synthetic construct
  misc_feature 1..59: note = Description of sequence: Primer
  source 1..59: mol_type = other DNA
atggacgacgacgacaagcaggatgaacctatacaaaaaaaaaaaaaaaaaaaaaaaaa

SEQ ID NO: 906 - DNA, 59 bp, synthetic construct
  misc_feature 1..59: note = Description of sequence: Primer
  source 1..59: mol_type = other DNA
atggacgacgacgacaagcagatggccgataagaaaaaaaaaaaaaaaaaaaaaaaaaa

SEQ ID NO: 907 - DNA, 59 bp, synthetic construct
  misc_feature 1..59: note = Description of sequence: Primer
  source 1..59: mol_type = other DNA
atggacgacgacgacaagctagtgagggcgcattaaaaaaaaaaaaaaaaaaaaaaaaa

SEQ ID NO: 908 - DNA, 59 bp, synthetic construct
  misc_feature 1..59: note = Description of sequence: Primer
  source 1..59: mol_type = other DNA
atggacgacgacgacaagtgatacgactagcgccaaaaaaaaaaaaaaaaaaaaaaaaa

SEQ ID NO: 909 - DNA, 59 bp, synthetic construct
  misc_feature 1..59: note = Description of sequence: Primer
  source 1..59: mol_type = other DNA
atggacgacgacgacaaggatcacctgcaggctaaaaaaaaaaaaaaaaaaaaaaaaaa

SEQ ID NO: 910 - DNA, 59 bp, synthetic construct
  misc_feature 1..59: note = Description of sequence: Primer
  source 1..59: mol_type = other DNA
atggacgacgacgacaaggcatgttgccagaagaaaaaaaaaaaaaaaaaaaaaaaaaa

SEQ ID NO: 911 - DNA, 59 bp, synthetic construct
  misc_feature 1..59: note = Description of sequence: Primer
  source 1..59: mol_type = other DNA
atggacgacgacgacaaggagacgtagtactatgaaaaaaaaaaaaaaaaaaaaaaaaa

SEQ ID NO: 912 - DNA, 59 bp, synthetic construct
  misc_feature 1..59: note = Description of sequence: Primer
  source 1..59: mol_type = other DNA
atggacgacgacgacaagtccagctcaacaacgtaaaaaaaaaaaaaaaaaaaaaaaaa

SEQ ID NO: 913 - DNA, 59 bp, synthetic construct
  misc_feature 1..59: note = Description of sequence: Primer
  source 1..59: mol_type = other DNA
atggacgacgacgacaagcagtgcctgagatgacaaaaaaaaaaaaaaaaaaaaaaaaa

SEQ ID NO: 914 - DNA, 59 bp, synthetic construct
  misc_feature 1..59: note = Description of sequence: Primer
  source 1..59: mol_type = other DNA
atggacgacgacgacaagagcacctctaagtcggaaaaaaaaaaaaaaaaaaaaaaaaa

SEQ ID NO: 915 - DNA, 59 bp, synthetic construct
  misc_feature 1..59: note = Description of sequence: Primer
  source 1..59: mol_type = other DNA
atggacgacgacgacaagttgcgttagagtgtcgaaaaaaaaaaaaaaaaaaaaaaaaa

SEQ ID NO: 916 - DNA, 59 bp, synthetic construct
  misc_feature 1..59: note = Description of sequence: Primer
  source 1..59: mol_type = other DNA
atggacgacgacgacaaggtcaaatcgtctgcacaaaaaaaaaaaaaaaaaaaaaaaaa

SEQ ID NO: 917 - DNA, 59 bp, synthetic construct
  misc_feature 1..59: note = Description of sequence: Primer
  source 1..59: mol_type = other DNA
atggacgacgacgacaaggcaacttgtgcctacaaaaaaaaaaaaaaaaaaaaaaaaaa

SEQ ID NO: 918 - DNA, 59 bp, synthetic construct
  misc_feature 1..59: note = Description of sequence: Primer
  source 1..59: mol_type = other DNA
atggacgacgacgacaagcgagcaaagtgtccttaaaaaaaaaaaaaaaaaaaaaaaaa

SEQ ID NO: 919 - DNA, 59 bp, synthetic construct
  misc_feature 1..59: note = Description of sequence: Primer
  source 1..59: mol_type = other DNA
atggacgacgacgacaagcatgaaagacacgacgaaaaaaaaaaaaaaaaaaaaaaaaa

SEQ ID NO: 920 - DNA, 59 bp, synthetic construct
  misc_feature 1..59: note = Description of sequence: Primer
  source 1..59: mol_type = other DNA
atggacgacgacgacaagaggagtatctcacacaaaaaaaaaaaaaaaaaaaaaaaaaa

SEQ ID NO: 921 - DNA, 59 bp, synthetic construct
  misc_feature 1..59: note = Description of sequence: Primer
  source 1..59: mol_type = other DNA
atggacgacgacgacaagtcgtgcatacctagagaaaaaaaaaaaaaaaaaaaaaaaaa

SEQ ID NO: 922 - DNA, 59 bp, synthetic construct
  misc_feature 1..59: note = Description of sequence: Primer
  source 1..59: mol_type = other DNA
atggacgacgacgacaagctcattcccagatcggaaaaaaaaaaaaaaaaaaaaaaaaa

SEQ ID NO: 923 - DNA, 59 bp, synthetic construct
  misc_feature 1..59: note = Description of sequence: Primer
  source 1..59: mol_type = other DNA
atggacgacgacgacaagtacctagcaaggacggaaaaaaaaaaaaaaaaaaaaaaaaa

SEQ ID NO: 924 - DNA, 59 bp, synthetic construct
  misc_feature 1..59: note = Description of sequence: Primer
  source 1..59: mol_type = other DNA
atggacgacgacgacaagtacagagtccgctgttaaaaaaaaaaaaaaaaaaaaaaaaa

SEQ ID NO: 925 - DNA, 59 bp, synthetic construct
  misc_feature 1..59: note = Description of sequence: Primer
  source 1..59: mol_type = other DNA
atggacgacgacgacaagctgttggaatttctggaaaaaaaaaaaaaaaaaaaaaaaaa

SEQ ID NO: 926 - DNA, 59 bp, synthetic construct
  misc_feature 1..59: note = Description of sequence: Primer
  source 1..59: mol_type = other DNA
atggacgacgacgacaagtaggccgaagtaccacaaaaaaaaaaaaaaaaaaaaaaaaa

SEQ ID NO: 927 - DNA, 59 bp, synthetic construct
  misc_feature 1..59: note = Description of sequence: Primer
  source 1..59: mol_type = other DNA
atggacgacgacgacaagcacgtaacgagtttgcaaaaaaaaaaaaaaaaaaaaaaaaa

SEQ ID NO: 928 - DNA, 59 bp, synthetic construct
  misc_feature 1..59: note = Description of sequence: Primer
  source 1..59: mol_type = other DNA
atggacgacgacgacaagggtcctaatctatgtgaaaaaaaaaaaaaaaaaaaaaaaaa

SEQ ID NO: 929 - DNA, 59 bp, synthetic construct
  misc_feature 1..59: note = Description of sequence: Primer
  source 1..59: mol_type = other DNA
atggacgacgacgacaaggagcgtgcagattaccaaaaaaaaaaaaaaaaaaaaaaaaa

SEQ ID NO: 930 - DNA, 59 bp, synthetic construct
  misc_feature 1..59: note = Description of sequence: Primer
  source 1..59: mol_type = other DNA
atggacgacgacgacaagtcactcgaacggagacaaaaaaaaaaaaaaaaaaaaaaaaa

SEQ ID NO: 931 - DNA, 59 bp, synthetic construct
  misc_feature 1..59: note = Description of sequence: Primer
  source 1..59: mol_type = other DNA
atggacgacgacgacaagtgggcaacagagtaggaaaaaaaaaaaaaaaaaaaaaaaaa

SEQ ID NO: 932 - DNA, 59 bp, synthetic construct
  misc_feature 1..59: note = Description of sequence: Primer
  source 1..59: mol_type = other DNA
atggacgacgacgacaagtgatatggagacaccaaaaaaaaaaaaaaaaaaaaaaaaaa

SEQ ID NO: 933 - DNA, 59 bp, synthetic construct
  misc_feature 1..59: note = Description of sequence: Primer
  source 1..59: mol_type = other DNA
atggacgacgacgacaagcattgtggcaagactgaaaaaaaaaaaaaaaaaaaaaaaaa

SEQ ID NO: 934 - DNA, 59 bp, synthetic construct
  misc_feature 1..59: note = Description of sequence: Primer
  source 1..59: mol_type = other DNA
atggacgacgacgacaagttatgactaccgcacaaaaaaaaaaaaaaaaaaaaaaaaaa

SEQ ID NO: 935 - DNA, 59 bp, synthetic construct
  misc_feature 1..59: note = Description of sequence: Primer
  source 1..59: mol_type = other DNA
atggacgacgacgacaagtatgcggaacgttgtgaaaaaaaaaaaaaaaaaaaaaaaaa

SEQ ID NO: 936 - DNA, 59 bp, synthetic construct
  misc_feature 1..59: note = Description of sequence: Primer
  source 1..59: mol_type = other DNA
atggacgacgacgacaagccattgcgtcttgtccaaaaaaaaaaaaaaaaaaaaaaaaa

SEQ ID NO: 937 - DNA, 59 bp, synthetic construct
  misc_feature 1..59: note = Description of sequence: Primer
  source 1..59: mol_type = other DNA
atggacgacgacgacaagtggcgctgcgtataataaaaaaaaaaaaaaaaaaaaaaaaa

SEQ ID NO: 938 - DNA, 59 bp, synthetic construct
  misc_feature 1..59: note = Description of sequence: Primer
  source 1..59: mol_type = other DNA
atggacgacgacgacaagtgccttacgacacgtaaaaaaaaaaaaaaaaaaaaaaaaaa

SEQ ID NO: 939 - DNA, 59 bp, synthetic construct
  misc_feature 1..59: note = Description of sequence: Primer
  source 1..59: mol_type = other DNA
atggacgacgacgacaaggtttgggtaggagggaaaaaaaaaaaaaaaaaaaaaaaaaa

SEQ ID NO: 940 - DNA, 59 bp, synthetic construct
  misc_feature 1..59: note = Description of sequence: Primer
  source 1..59: mol_type = other DNA
atggacgacgacgacaaggttcgttttcggtgccaaaaaaaaaaaaaaaaaaaaaaaaa

SEQ ID NO: 941 - DNA, 59 bp, synthetic construct
  misc_feature 1..59: note = Description of sequence: Primer
  source 1..59: mol_type = other DNA
atggacgacgacgacaagatattcgccggcaaataaaaaaaaaaaaaaaaaaaaaaaaa

SEQ ID NO: 942 - DNA, 59 bp, synthetic construct
  misc_feature 1..59: note = Description of sequence: Primer
  source 1..59: mol_type = other DNA
atggacgacgacgacaaggggaatcatttgctccaaaaaaaaaaaaaaaaaaaaaaaaa

SEQ ID NO: 943 - DNA, 59 bp, synthetic construct
  misc_feature 1..59: note = Description of sequence: Primer
  source 1..59: mol_type = other DNA
atggacgacgacgacaagccacggaactcgatgtaaaaaaaaaaaaaaaaaaaaaaaaa

SEQ ID NO: 944 - DNA, 59 bp, synthetic construct
  misc_feature 1..59: note = Description of sequence: Primer
  source 1..59: mol_type = other DNA
atggacgacgacgacaaggtaatctttgctctcgaaaaaaaaaaaaaaaaaaaaaaaaa

SEQ ID NO: 945 - DNA, 59 bp, synthetic construct
  misc_feature 1..59: note = Description of sequence: Primer
  source 1..59: mol_type = other DNA
atggacgacgacgacaagaagtgcggtatcgaggaaaaaaaaaaaaaaaaaaaaaaaaa

SEQ ID NO: 946 - DNA, 59 bp, synthetic construct
  misc_feature 1..59: note = Description of sequence: Primer
  source 1..59: mol_type = other DNA
atggacgacgacgacaaggggctgcaagttcacaaaaaaaaaaaaaaaaaaaaaaaaaa

SEQ ID NO: 947 - DNA, 59 bp, synthetic construct
  misc_feature 1..59: note = Description of sequence: Primer
  source 1..59: mol_type = other DNA
atggacgacgacgacaagaacccaagcagctatcaaaaaaaaaaaaaaaaaaaaaaaaa

SEQ ID NO: 948 - DNA, 59 bp, synthetic construct
  misc_feature 1..59: note = Description of sequence: Primer
  source 1..59: mol_type = other DNA
atggacgacgacgacaaggatggagaggttgaataaaaaaaaaaaaaaaaaaaaaaaaa

SEQ ID NO: 949 - DNA, 59 bp, synthetic construct
  misc_feature 1..59: note = Description of sequence: Primer
  source 1..59: mol_type = other DNA
atggacgacgacgacaagttagaggttgacggtaaaaaaaaaaaaaaaaaaaaaaaaaa

SEQ ID NO: 950 - DNA, 59 bp, synthetic construct
  misc_feature 1..59: note = Description of sequence: Primer
  source 1..59: mol_type = other DNA
atggacgacgacgacaaggataatctccgacggcaaaaaaaaaaaaaaaaaaaaaaaaa

SEQ ID NO: 951 - DNA, 59 bp, synthetic construct
  misc_feature 1..59: note = Description of sequence: Primer
  source 1..59: mol_type = other DNA
atggacgacgacgacaagagattagtgctcccgaaaaaaaaaaaaaaaaaaaaaaaaaa

SEQ ID NO: 952 - DNA, 59 bp, synthetic construct
  misc_feature 1..59: note = Description of sequence: Primer
  source 1..59: mol_type = other DNA
atggacgacgacgacaagactccagttcttgtacaaaaaaaaaaaaaaaaaaaaaaaaa

SEQ ID NO: 953 - DNA, 59 bp, synthetic construct
  misc_feature 1..59: note = Description of sequence: Primer
  source 1..59: mol_type = other DNA
atggacgacgacgacaagcaccctactcaaagacaaaaaaaaaaaaaaaaaaaaaaaaa

SEQ ID NO: 954 - DNA, 59 bp, synthetic construct
  misc_feature 1..59: note = Description of sequence: Primer
  source 1..59: mol_type = other DNA
atggacgacgacgacaagtacctcatacgcgttgaaaaaaaaaaaaaaaaaaaaaaaaa

SEQ ID NO: 955 - DNA, 59 bp, synthetic construct
  misc_feature 1..59: note = Description of sequence: Primer
  source 1..59: mol_type = other DNA
atggacgacgacgacaagcgaaaatcgggtagataaaaaaaaaaaaaaaaaaaaaaaaa

SEQ ID NO: 956 - DNA, 59 bp, synthetic construct
  misc_feature 1..59: note = Description of sequence: Primer
  source 1..59: mol_type = other DNA
atggacgacgacgacaagcgatcgctcctaccataaaaaaaaaaaaaaaaaaaaaaaaa

SEQ ID NO: 957 - DNA, 59 bp, synthetic construct
  misc_feature 1..59: note = Description of sequence: Primer
  source 1..59: mol_type = other DNA
atggacgacgacgacaagcccactccatactagaaaaaaaaaaaaaaaaaaaaaaaaaa

SEQ ID NO: 958 - DNA, 59 bp, synthetic construct
  misc_feature 1..59: note = Description of sequence: Primer
  source 1..59: mol_type = other DNA
atggacgacgacgacaagacggctttacgcaagaaaaaaaaaaaaaaaaaaaaaaaaaa

SEQ ID NO: 959 - DNA, 59 bp, synthetic construct
  misc_feature 1..59: note = Description of sequence: Primer
  source 1..59: mol_type = other DNA
atggacgacgacgacaagtcgcagaaccatctgcaaaaaaaaaaaaaaaaaaaaaaaaa

SEQ ID NO: 960 - DNA, 59 bp, synthetic construct
  misc_feature 1..59: note = Description of sequence: Primer
  source 1..59: mol_type = other DNA
atggacgacgacgacaaggagttgctagcctgtaaaaaaaaaaaaaaaaaaaaaaaaaa

SEQ ID NO: 961 - DNA, 59 bp, synthetic construct
  misc_feature 1..59: note = Description of sequence: Primer
  source 1..59: mol_type = other DNA
atggacgacgacgacaagttaactgcttcagccgaaaaaaaaaaaaaaaaaaaaaaaaa

SEQ ID NO: 962 - DNA, 59 bp, synthetic construct
  misc_feature 1..59: note = Description of sequence: Primer
  source 1..59: mol_type = other DNA
atggacgacgacgacaagtcgcgatgaccgctataaaaaaaaaaaaaaaaaaaaaaaaa

SEQ ID NO: 963 - DNA, 59 bp, synthetic construct
  misc_feature 1..59: note = Description of sequence: Primer
  source 1..59: mol_type = other DNA
atggacgacgacgacaaggacgaacgcgttaccaaaaaaaaaaaaaaaaaaaaaaaaaa

SEQ ID NO: 964 - DNA, 59 bp, synthetic construct
  misc_feature 1..59: note = Description of sequence: Primer
  source 1..59: mol_type = other DNA
atggacgacgacgacaagcggcaaaactactgtcaaaaaaaaaaaaaaaaaaaaaaaaa

SEQ ID NO: 965 - DNA, 59 bp, synthetic construct
  misc_feature 1..59: note = Description of sequence: Primer
  source 1..59: mol_type = other DNA
atggacgacgacgacaagcccgactctgatgaagaaaaaaaaaaaaaaaaaaaaaaaaa

SEQ ID NO: 966 - DNA, 59 bp, synthetic construct
  misc_feature 1..59: note = Description of sequence: Primer
  source 1..59: mol_type = other DNA
atggacgacgacgacaagactgcgctacagagtcaaaaaaaaaaaaaaaaaaaaaaaaa

SEQ ID NO: 967 - DNA, 59 bp, synthetic construct
  misc_feature 1..59: note = Description of sequence: Primer
  source 1..59: mol_type = other DNA
atggacgacgacgacaagacggtgtaccttagggaaaaaaaaaaaaaaaaaaaaaaaaa

SEQ ID NO: 968 - DNA, 59 bp, synthetic construct
  misc_feature 1..59: note = Description of sequence: Primer
  source 1..59: mol_type = other DNA
atggacgacgacgacaagtcgagtccgcagtatcaaaaaaaaaaaaaaaaaaaaaaaaa

SEQ ID NO: 969 - DNA, 59 bp, synthetic construct
  misc_feature 1..59: note = Description of sequence: Primer
  source 1..59: mol_type = other DNA
atggacgacgacgacaaggacgctgcctaattggaaaaaaaaaaaaaaaaaaaaaaaaa

SEQ ID NO: 970 - DNA, 59 bp, synthetic construct
  misc_feature 1..59: note = Description of sequence: Primer
  source 1..59: mol_type = other DNA
atggacgacgacgacaagtggggatggactagtaaaaaaaaaaaaaaaaaaaaaaaaaa

SEQ ID NO: 971 - DNA, 59 bp, synthetic construct
  misc_feature 1..59: note = Description of sequence: Primer
  source 1..59: mol_type = other DNA
atggacgacgacgacaaggctctaaaggccacagaaaaaaaaaaaaaaaaaaaaaaaaa

SEQ ID NO: 972 - DNA, 59 bp, synthetic construct
  misc_feature 1..59: note = Description of sequence: Primer
  source 1..59: mol_type = other DNA
atggacgacgacgacaagcaggagtggtgccttaaaaaaaaaaaaaaaaaaaaaaaaaa

SEQ ID NO: 973 - DNA, 59 bp, synthetic construct
  misc_feature 1..59: note = Description of sequence: Primer
  source 1..59: mol_type = other DNA
atggacgacgacgacaagccgagaagtgttttgaaaaaaaaaaaaaaaaaaaaaaaaaa

SEQ ID NO: 974 - DNA, 59 bp, synthetic construct
  misc_feature 1..59: note = Description of sequence: Primer
  source 1..59: mol_type = other DNA
atggacgacgacgacaagtgttcaagccacctagaaaaaaaaaaaaaaaaaaaaaaaaa

SEQ ID NO: 975 - DNA, 59 bp, synthetic construct
  misc_feature 1..59: note = Description of sequence: Primer
  source 1..59: mol_type = other DNA
atggacgacgacgacaagctcccttgagtgtagcaaaaaaaaaaaaaaaaaaaaaaaaa

SEQ ID NO: 976 - DNA, 59 bp, synthetic construct
  misc_feature 1..59: note = Description of sequence: Primer
  source 1..59: mol_type = other DNA
atggacgacgacgacaagaatgagcactaccgacaaaaaaaaaaaaaaaaaaaaaaaaa

SEQ ID NO: 977 - DNA, 59 bp, synthetic construct
  misc_feature 1..59: note = Description of sequence: Primer
  source 1..59: mol_type = other DNA
atggacgacgacgacaagacgcaagtcgcaaagcaaaaaaaaaaaaaaaaaaaaaaaaa

SEQ ID NO: 978 - DNA, 59 bp, synthetic construct
  misc_feature 1..59: note = Description of sequence: Primer
  source 1..59: mol_type = other DNA
atggacgacgacgacaagattgggagagtcagttaaaaaaaaaaaaaaaaaaaaaaaaa

SEQ ID NO: 979 - DNA, 59 bp, synthetic construct
  misc_feature 1..59: note = Description of sequence: Primer
  source 1..59: mol_type = other DNA
atggacgacgacgacaaggcgacctatataaagcaaaaaaaaaaaaaaaaaaaaaaaaa

SEQ ID NO: 980 - DNA, 59 bp, synthetic construct
  misc_feature 1..59: note = Description of sequence: Primer
  source 1..59: mol_type = other DNA
atggacgacgacgacaagatccgccacttcagataaaaaaaaaaaaaaaaaaaaaaaaa

SEQ ID NO: 981 - DNA, 59 bp, synthetic construct
  misc_feature 1..59: note = Description of sequence: Primer
  source 1..59: mol_type = other DNA
atggacgacgacgacaagtaagcgggttcctattaaaaaaaaaaaaaaaaaaaaaaaaa

SEQ ID NO: 982 - DNA, 59 bp, synthetic construct
  misc_feature 1..59: note = Description of sequence: Primer
  source 1..59: mol_type = other DNA
atggacgacgacgacaagaccctacgtaccgtcaaaaaaaaaaaaaaaaaaaaaaaaaa

SEQ ID NO: 983 - DNA, 59 bp, synthetic construct
  misc_feature 1..59: note = Description of sequence: Primer
  source 1..59: mol_type = other DNA
atggacgacgacgacaagtgcgccatcggttttcaaaaaaaaaaaaaaaaaaaaaaaaa

SEQ ID NO: 984 - DNA, 59 bp, synthetic construct
  misc_feature 1..59: note = Description of sequence: Primer
  source 1..59: mol_type = other DNA
atggacgacgacgacaaggcctaacttctgcctcaaaaaaaaaaaaaaaaaaaaaaaaa

SEQ ID NO: 985 - DNA, 59 bp, synthetic construct
  misc_feature 1..59: note = Description of sequence: Primer
  source 1..59: mol_type = other DNA
atggacgacgacgacaaggtcctttaatcccctaaaaaaaaaaaaaaaaaaaaaaaaaa

SEQ ID NO: 986 - DNA, 59 bp, synthetic construct
  misc_feature 1..59: note = Description of sequence: Primer
  source 1..59: mol_type = other DNA
atggacgacgacgacaaggattgtctagacgtagaaaaaaaaaaaaaaaaaaaaaaaaa

SEQ ID NO: 987 - DNA, 59 bp, synthetic construct
  misc_feature 1..59: note = Description of sequence: Primer
  source 1..59: mol_type = other DNA
atggacgacgacgacaagaacccgcaaaatcctaaaaaaaaaaaaaaaaaaaaaaaaaa

SEQ ID NO: 988 - DNA, 59 bp, synthetic construct
  misc_feature 1..59: note = Description of sequence: Primer
  source 1..59: mol_type = other DNA
atggacgacgacgacaagtacaacaccaacgctcaaaaaaaaaaaaaaaaaaaaaaaaa

SEQ ID NO: 989 - DNA, 59 bp, synthetic construct
  misc_feature 1..59: note = Description of sequence: Primer
  source 1..59: mol_type = other DNA
atggacgacgacgacaagtgtgctattgtctccaaaaaaaaaaaaaaaaaaaaaaaaaa

SEQ ID NO: 990 - DNA, 59 bp, synthetic construct
  misc_feature 1..59: note = Description of sequence: Primer
  source 1..59: mol_type = other DNA
atggacgacgacgacaagagatccacacccggttaaaaaaaaaaaaaaaaaaaaaaaaa

SEQ ID NO: 991 - DNA, 59 bp, synthetic construct
  misc_feature 1..59: note = Description of sequence: Primer
  source 1..59: mol_type = other DNA
atggacgacgacgacaaggtggtctccaccatcaaaaaaaaaaaaaaaaaaaaaaaaaa

SEQ ID NO: 992 - DNA, 59 bp, synthetic construct
  misc_feature 1..59: note = Description of sequence: Primer
  source 1..59: mol_type = other DNA
atggacgacgacgacaaggatattccgtcaaaccaaaaaaaaaaaaaaaaaaaaaaaaa

SEQ ID NO: 993 - DNA, 59 bp, synthetic construct
  misc_feature 1..59: note = Description of sequence: Primer
  source 1..59: mol_type = other DNA
atggacgacgacgacaagacatcgtcgcggattaaaaaaaaaaaaaaaaaaaaaaaaaa

SEQ ID NO: 994 - DNA, 59 bp, synthetic construct
  misc_feature 1..59: note = Description of sequence: Primer
  source 1..59: mol_type = other DNA
atggacgacgacgacaagaacggtatttggcggcaaaaaaaaaaaaaaaaaaaaaaaaa

SEQ ID NO: 995 - DNA, 59 bp, synthetic construct
  misc_feature 1..59: note = Description of sequence: Primer
  source 1..59: mol_type = other DNA
atggacgacgacgacaagcgctggattgcaaatgaaaaaaaaaaaaaaaaaaaaaaaaa

SEQ ID NO: 996 - DNA, 59 bp, synthetic construct
  misc_feature 1..59: note = Description of sequence: Primer
  source 1..59: mol_type = other DNA
atggacgacgacgacaagcaaaggggttacatcgaaaaaaaaaaaaaaaaaaaaaaaaa

SEQ ID NO: 997 - DNA, 59 bp, synthetic construct
  misc_feature 1..59: note = Description of sequence: Primer
  source 1..59: mol_type = other DNA
atggacgacgacgacaagcgagcagttcaaggagaaaaaaaaaaaaaaaaaaaaaaaaa

SEQ ID NO: 998 - DNA, 59 bp, synthetic construct
  misc_feature 1..59: note = Description of sequence: Primer
  source 1..59: mol_type = other DNA
atggacgacgacgacaagagtagggtccagcatgaaaaaaaaaaaaaaaaaaaaaaaaa

SEQ ID NO: 999 - DNA, 59 bp, synthetic construct
  misc_feature 1..59: note = Description of sequence: Primer
  source 1..59: mol_type = other DNA
atggacgacgacgacaagatgcttgcccagtctaaaaaaaaaaaaaaaaaaaaaaaaaa

SEQ ID NO: 1000 - DNA, 59 bp, synthetic construct
  misc_feature 1..59: note = Description of sequence: Primer
  source 1..59: mol_type = other DNA
atggacgacgacgacaagtcgtaaatctaggcgaaaaaaaaaaaaaaaaaaaaaaaaaa

SEQ ID NO: 1001 - DNA, 59 bp, synthetic construct
  misc_feature 1..59: note = Description of sequence: Primer
  source 1..59: mol_type = other DNA
atggacgacgacgacaagtggtgacatagagcgcaaaaaaaaaaaaaaaaaaaaaaaaa

SEQ ID NO: 1002 - DNA, 59 bp, synthetic construct
  misc_feature 1..59: note = Description of sequence: Primer
  source 1..59: mol_type = other DNA
atggacgacgacgacaagttggtcgacttcgaagaaaaaaaaaaaaaaaaaaaaaaaaa

SEQ ID NO: 1003 - DNA, 59 bp, synthetic construct
  misc_feature 1..59: note = Description of sequence: Primer
  source 1..59: mol_type = other DNA
atggacgacgacgacaagccacttaccgtctctcaaaaaaaaaaaaaaaaaaaaaaaaa

SEQ ID NO: 1004 - DNA, 59 bp, synthetic construct
  misc_feature 1..59: note = Description of sequence: Primer
  source 1..59: mol_type = other DNA
atggacgacgacgacaagtgtcctaagtcgacgaaaaaaaaaaaaaaaaaaaaaaaaaa

SEQ ID NO: 1005 - DNA, 59 bp, synthetic construct
  misc_feature 1..59: note = Description of sequence: Primer
  source 1..59: mol_type = other DNA
atggacgacgacgacaaggcgaacggacgataacaaaaaaaaaaaaaaaaaaaaaaaaa

SEQ ID NO: 1006 - DNA, 59 bp, synthetic construct
  misc_feature 1..59: note = Description of sequence: Primer
  source 1..59: mol_type = other DNA
atggacgacgacgacaagacggtgagtaaccatgaaaaaaaaaaaaaaaaaaaaaaaaa

SEQ ID NO: 1007 - DNA, 59 bp, synthetic construct
  misc_feature 1..59: note = Description of sequence: Primer
  source 1..59: mol_type = other DNA
atggacgacgacgacaaggaatgtgagacgggctaaaaaaaaaaaaaaaaaaaaaaaaa

SEQ ID NO: 1008 - DNA, 59 bp, synthetic construct
  misc_feature 1..59: note = Description of sequence: Primer
  source 1..59: mol_type = other DNA
atggacgacgacgacaaggattggtgtgctcgcaaaaaaaaaaaaaaaaaaaaaaaaaa

SEQ ID NO: 1009 - DNA, 59 bp, synthetic construct
  misc_feature 1..59: note = Description of sequence: Primer
  source 1..59: mol_type = other DNA
atggacgacgacgacaagcggacttcttacgttcaaaaaaaaaaaaaaaaaaaaaaaaa

SEQ ID NO: 1010 - DNA, 59 bp, synthetic construct
  misc_feature 1..59: note = Description of sequence: Primer
  source 1..59: mol_type = other DNA
atggacgacgacgacaagacatccaaaggctccaaaaaaaaaaaaaaaaaaaaaaaaaa

SEQ ID NO: 1011 - DNA, 59 bp, synthetic construct
  misc_feature 1..59: note = Description of sequence: Primer
  source 1..59: mol_type = other DNA
atggacgacgacgacaagttagagtccttacacgaaaaaaaaaaaaaaaaaaaaaaaaa

SEQ ID NO: 1012 - DNA, 59 bp, synthetic construct
  misc_feature 1..59: note = Description of sequence: Primer
  source 1..59: mol_type = other DNA
atggacgacgacgacaagacgctcaaggttgtgtaaaaaaaaaaaaaaaaaaaaaaaaa

SEQ ID NO: 1013 - DNA, 59 bp, synthetic construct
  misc_feature 1..59: note = Description of sequence: Primer
  source 1..59: mol_type = other DNA
atggacgacgacgacaagcggggcctaataatggaaaaaaaaaaaaaaaaaaaaaaaaa

SEQ ID NO: 1014 - DNA, 59 bp, synthetic construct
  misc_feature 1..59: note = Description of sequence: Primer
  source 1..59: mol_type = other DNA
atggacgacgacgacaagccgtaagcctggattgaaaaaaaaaaaaaaaaaaaaaaaaa

SEQ ID NO: 1015 - DNA, 59 bp, synthetic construct
  misc_feature 1..59: note = Description of sequence: Primer
  source 1..59: mol_type = other DNA
atggacgacgacgacaaggctacgctatgtgttaaaaaaaaaaaaaaaaaaaaaaaaaa

SEQ ID NO: 1016 - DNA, 59 bp, synthetic construct
  misc_feature 1..59: note = Description of sequence: Primer
  source 1..59: mol_type = other DNA
atggacgacgacgacaagaaacaccagtgggtagaaaaaaaaaaaaaaaaaaaaaaaaa

SEQ ID NO: 1017 - DNA, 59 bp, synthetic construct
  misc_feature 1..59: note = Description of sequence: Primer
  source 1..59: mol_type = other DNA
atggacgacgacgacaagttgactctaaggcaggaaaaaaaaaaaaaaaaaaaaaaaaa

SEQ ID NO: 1018 - DNA, 59 bp, synthetic construct
  misc_feature 1..59: note = Description of sequence: Primer
  source 1..59: mol_type = other DNA
atggacgacgacgacaagcactatttgtcttgggaaaaaaaaaaaaaaaaaaaaaaaaa

SEQ ID NO: 1019 - DNA, 59 bp, synthetic construct
  misc_feature 1..59: note = Description of sequence: Primer
  source 1..59: mol_type = other DNA
atggacgacgacgacaaggctacaagttgaccataaaaaaaaaaaaaaaaaaaaaaaaa

SEQ ID NO: 1020 - DNA, 59 bp, synthetic construct
  misc_feature 1..59: note = Description of sequence: Primer
  source 1..59: mol_type = other DNA
atggacgacgacgacaaggcagtagcggatactcaaaaaaaaaaaaaaaaaaaaaaaaa

SEQ ID NO: 1021 - DNA, 59 bp, synthetic construct
  misc_feature 1..59: note = Description of sequence: Primer
  source 1..59: mol_type = other DNA
atggacgacgacgacaagaactggtatcgctcacaaaaaaaaaaaaaaaaaaaaaaaaa

SEQ ID NO: 1022 - DNA, 59 bp, synthetic construct
  misc_feature 1..59: note = Description of sequence: Primer
  source 1..59: mol_type = other DNA
atggacgacgacgacaagagcttgacgagcctataaaaaaaaaaaaaaaaaaaaaaaaa

SEQ ID NO: 1023 - DNA, 59 bp, synthetic construct
  misc_feature 1..59: note = Description of sequence: Primer
  source 1..59: mol_type = other DNA
atggacgacgacgacaagattgccgatgagtagaaaaaaaaaaaaaaaaaaaaaaaaaa

SEQ ID NO: 1024 - DNA, 59 bp, synthetic construct
  misc_feature 1..59: note = Description of sequence: Primer
  source 1..59: mol_type = other DNA
atggacgacgacgacaagaacaggtggttacggtaaaaaaaaaaaaaaaaaaaaaaaaa

SEQ ID NO: 1025 - DNA, 59 bp, synthetic construct
  misc_feature 1..59: note = Description of sequence: Primer
  source 1..59: mol_type = other DNA
atggacgacgacgacaagaaactgacgctcgaggaaaaaaaaaaaaaaaaaaaaaaaaa

SEQ ID NO: 1026 - DNA, 59 bp, synthetic construct
  misc_feature 1..59: note = Description of sequence: Primer
  source 1..59: mol_type = other DNA
atggacgacgacgacaagcgaaatgtcggctcagaaaaaaaaaaaaaaaaaaaaaaaaa

SEQ ID NO: 1027 - DNA, 59 bp, synthetic construct
  misc_feature 1..59: note = Description of sequence: Primer
  source 1..59: mol_type = other DNA
atggacgacgacgacaagtccgatctcagagtttaaaaaaaaaaaaaaaaaaaaaaaaa

SEQ ID NO: 1028 - DNA, 59 bp, synthetic construct
  misc_feature 1..59: note = Description of sequence: Primer
  source 1..59: mol_type = other DNA
atggacgacgacgacaagactgcttcgagaagcgaaaaaaaaaaaaaaaaaaaaaaaaa

SEQ ID NO: 1029 - DNA, 59 bp, synthetic construct
  misc_feature 1..59: note = Description of sequence: Primer
  source 1..59: mol_type = other DNA
atggacgacgacgacaaggtgatgctgtagggcaaaaaaaaaaaaaaaaaaaaaaaaaa

SEQ ID NO: 1030 - DNA, 59 bp, synthetic construct
  misc_feature 1..59: note = Description of sequence: Primer
  source 1..59: mol_type = other DNA
atggacgacgacgacaagagtgggtatgtggtacaaaaaaaaaaaaaaaaaaaaaaaaa

SEQ ID NO: 1031 - DNA, 59 bp, synthetic construct
  misc_feature 1..59: note = Description of sequence: Primer
  source 1..59: mol_type = other DNA
atggacgacgacgacaagggagtaagttcaagcaaaaaaaaaaaaaaaaaaaaaaaaaa

SEQ ID NO: 1032 - DNA, 59 bp, synthetic construct
  misc_feature 1..59: note = Description of sequence: Primer
  source 1..59: mol_type = other DNA
atggacgacgacgacaaggagcagttttcgccgaaaaaaaaaaaaaaaaaaaaaaaaaa

SEQ ID NO: 1033 - DNA, 59 bp, synthetic construct
  misc_feature 1..59: note = Description of sequence: Primer
  source 1..59: mol_type = other DNA
atggacgacgacgacaagcgattacgagtctaggaaaaaaaaaaaaaaaaaaaaaaaaa

SEQ ID NO: 1034 - DNA, 59 bp, synthetic construct
  misc_feature 1..59: note = Description of sequence: Primer
  source 1..59: mol_type = other DNA
atggacgacgacgacaagcgcggcacttcttagaaaaaaaaaaaaaaaaaaaaaaaaaa

SEQ ID NO: 1035 - DNA, 59 bp, synthetic construct
  misc_feature 1..59: note = Description of sequence: Primer
  source 1..59: mol_type = other DNA
atggacgacgacgacaagggtgcagttcctaagaaaaaaaaaaaaaaaaaaaaaaaaaa

SEQ ID NO: 1036 - DNA, 59 bp, synthetic construct
  misc_feature 1..59: note = Description of sequence: Primer
  source 1..59: mol_type = other DNA
atggacgacgacgacaagcgtaggcattagaagaaaaaaaaaaaaaaaaaaaaaaaaaa

SEQ ID NO: 1037 - DNA, 59 bp, synthetic construct
  misc_feature 1..59: note = Description of sequence: Primer
  source 1..59: mol_type = other DNA
atggacgacgacgacaaggctatcatcagcgcctaaaaaaaaaaaaaaaaaaaaaaaaa

SEQ ID NO: 1038 - DNA, 59 bp, synthetic construct
  misc_feature 1..59: note = Description of sequence: Primer
  source 1..59: mol_type = other DNA
atggacgacgacgacaaggcgggtaggtctaaataaaaaaaaaaaaaaaaaaaaaaaaa

SEQ ID NO: 1039 - DNA, 59 bp, synthetic construct
  misc_feature 1..59: note = Description of sequence: Primer
  source 1..59: mol_type = other DNA
atggacgacgacgacaagcgtccctttgaacattaaaaaaaaaaaaaaaaaaaaaaaaa

SEQ ID NO: 1040 - DNA, 59 bp, synthetic construct
  misc_feature 1..59: note = Description of sequence: Primer
  source 1..59: mol_type = other DNA
atggacgacgacgacaagtcagactgcgagacttaaaaaaaaaaaaaaaaaaaaaaaaa

SEQ ID NO: 1041 - DNA, 59 bp, synthetic construct
  misc_feature 1..59: note = Description of sequence: Primer
  source 1..59: mol_type = other DNA
atggacgacgacgacaagtgtgttcgttatcggtaaaaaaaaaaaaaaaaaaaaaaaaa

SEQ ID NO: 1042 - DNA, 59 bp, synthetic construct
  misc_feature 1..59: note = Description of sequence: Primer
  source 1..59: mol_type = other DNA
atggacgacgacgacaagcctaacagcgtaagcaaaaaaaaaaaaaaaaaaaaaaaaaa

SEQ ID NO: 1043 - DNA, 59 bp, synthetic construct
  misc_feature 1..59: note = Description of sequence: Primer
  source 1..59: mol_type = other DNA
atggacgacgacgacaagcctgacatttccgtcaaaaaaaaaaaaaaaaaaaaaaaaaa

SEQ ID NO: 1044 - DNA, 59 bp, synthetic construct
  misc_feature 1..59: note = Description of sequence: Primer
  source 1..59: mol_type = other DNA
atggacgacgacgacaagcgaaaccatcgccaataaaaaaaaaaaaaaaaaaaaaaaaa

SEQ ID NO: 1045 - DNA, 59 bp, synthetic construct
  misc_feature 1..59: note = Description of sequence: Primer
  source 1..59: mol_type = other DNA
atggacgacgacgacaaggatcacagaagagtgcaaaaaaaaaaaaaaaaaaaaaaaaa

SEQ ID NO: 1046 - DNA, 59 bp, synthetic construct
  misc_feature 1..59: note = Description of sequence: Primer
  source 1..59: mol_type = other DNA
atggacgacgacgacaagacgatacagagcaggtaaaaaaaaaaaaaaaaaaaaaaaaa

SEQ ID NO: 1047 - DNA, 59 bp, synthetic construct
  misc_feature 1..59: note = Description of sequence: Primer
  source 1..59: mol_type = other DNA
atggacgacgacgacaaggtcaggaacgagtcttaaaaaaaaaaaaaaaaaaaaaaaaa

SEQ ID NO: 1048 - DNA, 59 bp, synthetic construct
  misc_feature 1..59: note = Description of sequence: Primer
  source 1..59: mol_type = other DNA
atggacgacgacgacaagatactgattccctgtcaaaaaaaaaaaaaaaaaaaaaaaaa

SEQ ID NO: 1049 - DNA, 59 bp, synthetic construct
  misc_feature 1..59: note = Description of sequence: Primer
  source 1..59: mol_type = other DNA
atggacgacgacgacaagttttcgccatggttgtaaaaaaaaaaaaaaaaaaaaaaaaa

SEQ ID NO: 1050 - DNA, 59 bp, synthetic construct
  misc_feature 1..59: note = Description of sequence: Primer
  source 1..59: mol_type = other DNA
atggacgacgacgacaaggttcctacgaacaactaaaaaaaaaaaaaaaaaaaaaaaaa

SEQ ID NO: 1051 - DNA, 59 bp, synthetic construct
  misc_feature 1..59: note = Description of sequence: Primer
  source 1..59: mol_type = other DNA
atggacgacgacgacaagtcgataacgctactacaaaaaaaaaaaaaaaaaaaaaaaaa

SEQ ID NO: 1052 - DNA, 59 bp, synthetic construct
  misc_feature 1..59: note = Description of sequence: Primer
  source 1..59: mol_type = other DNA
atggacgacgacgacaagtggaacacctgaagttaaaaaaaaaaaaaaaaaaaaaaaaa

SEQ ID NO: 1053 - DNA, 59 bp, synthetic construct
  misc_feature 1..59: note = Description of sequence: Primer
  source 1..59: mol_type = other DNA
atggacgacgacgacaagcacgacgtgaaactctaaaaaaaaaaaaaaaaaaaaaaaaa

SEQ ID NO: 1054 - DNA, 59 bp, synthetic construct
  misc_feature 1..59: note = Description of sequence: Primer
  source 1..59: mol_type = other DNA
atggacgacgacgacaagatccagtttcaagaggaaaaaaaaaaaaaaaaaaaaaaaaa

SEQ ID NO: 1055 - DNA, 59 bp, synthetic construct
  misc_feature 1..59: note = Description of sequence: Primer
  source 1..59: mol_type = other DNA
atggacgacgacgacaagctgcggcgatctttcaaaaaaaaaaaaaaaaaaaaaaaaaa

SEQ ID NO: 1056 - DNA, 59 bp, synthetic construct
  misc_feature 1..59: note = Description of sequence: Primer
  source 1..59: mol_type = other DNA
atggacgacgacgacaagcggacttgacttccagaaaaaaaaaaaaaaaaaaaaaaaaa

SEQ ID NO: 1057 - DNA, 59 bp, synthetic construct
  misc_feature 1..59: note = Description of sequence: Primer
  source 1..59: mol_type = other DNA
atggacgacgacgacaaggtgtgaatgcataagcaaaaaaaaaaaaaaaaaaaaaaaaa

SEQ ID NO: 1058 - DNA, 59 bp, synthetic construct
  misc_feature 1..59: note = Description of sequence: Primer
  source 1..59: mol_type = other DNA
atggacgacgacgacaagtcaccgtgttaggtcaaaaaaaaaaaaaaaaaaaaaaaaaa

SEQ ID NO: 1059 - DNA, 59 bp, synthetic construct
  misc_feature 1..59: note = Description of sequence: Primer
  source 1..59: mol_type = other DNA
atggacgacgacgacaagggcatgattgtcgcacaaaaaaaaaaaaaaaaaaaaaaaaa

SEQ ID NO: 1060 - DNA, 59 bp, synthetic construct
  misc_feature 1..59: note = Description of sequence: Primer
  source 1..59: mol_type = other DNA
atggacgacgacgacaaggcctagggacacgattaaaaaaaaaaaaaaaaaaaaaaaaa

SEQ ID NO: 1061 - DNA, 59 bp, synthetic construct
  misc_feature 1..59: note = Description of sequence: Primer
  source 1..59: mol_type = other DNA
atggacgacgacgacaagacagtccaccatgatcaaaaaaaaaaaaaaaaaaaaaaaaa

SEQ ID NO: 1062 - DNA, 59 bp, synthetic construct
  misc_feature 1..59: note = Description of sequence: Primer
  source 1..59: mol_type = other DNA
atggacgacgacgacaagcaaccagtatagaagcaaaaaaaaaaaaaaaaaaaaaaaaa

SEQ ID NO: 1063 - DNA, 59 bp, synthetic construct
  misc_feature 1..59: note = Description of sequence: Primer
  source 1..59: mol_type = other DNA
atggacgacgacgacaagtgtaactcacgggttaaaaaaaaaaaaaaaaaaaaaaaaaa

SEQ ID NO: 1064 - DNA, 59 bp, synthetic construct
  misc_feature 1..59: note = Description of sequence: Primer
  source 1..59: mol_type = other DNA
atggacgacgacgacaagatagacccttggccctaaaaaaaaaaaaaaaaaaaaaaaaa

SEQ ID NO: 1065 - DNA, 59 bp, synthetic construct
  misc_feature 1..59: note = Description of sequence: Primer
  source 1..59: mol_type = other DNA
atggacgacgacgacaagctgtgtatgccctttgaaaaaaaaaaaaaaaaaaaaaaaaa

SEQ ID NO: 1066 - DNA, 59 bp, synthetic construct
  misc_feature 1..59: note = Description of sequence: Primer
  source 1..59: mol_type = other DNA
atggacgacgacgacaagatcccaaacttagtgcaaaaaaaaaaaaaaaaaaaaaaaaa

SEQ ID NO: 1067 - DNA, 59 bp, synthetic construct
  misc_feature 1..59: note = Description of sequence: Primer
  source 1..59: mol_type = other DNA
atggacgacgacgacaagtcttattacgcccggaaaaaaaaaaaaaaaaaaaaaaaaaa

SEQ ID NO: 1068 - DNA, 59 bp, synthetic construct
  misc_feature 1..59: note = Description of sequence: Primer
  source 1..59: mol_type = other DNA
atggacgacgacgacaagacgaatagtgcgccacaaaaaaaaaaaaaaaaaaaaaaaaa

SEQ ID NO: 1069 - DNA, 59 bp, synthetic construct
  misc_feature 1..59: note = Description of sequence: Primer
  source 1..59: mol_type = other DNA
atggacgacgacgacaagatgcactgatgatgcgaaaaaaaaaaaaaaaaaaaaaaaaa

SEQ ID NO: 1070 - DNA, 59 bp, synthetic construct
  misc_feature 1..59: note = Description of sequence: Primer
  source 1..59: mol_type = other DNA
atggacgacgacgacaagggtaaagtgtcccaagaaaaaaaaaaaaaaaaaaaaaaaaa

SEQ ID NO: 1071 - DNA, 59 bp, synthetic construct
  misc_feature 1..59: note = Description of sequence: Primer
  source 1..59: mol_type = other DNA
atggacgacgacgacaagggaagaactagtcccgaaaaaaaaaaaaaaaaaaaaaaaaa

SEQ ID NO: 1072 - DNA, 59 bp, synthetic construct
  misc_feature 1..59: note = Description of sequence: Primer
  source 1..59: mol_type = other DNA
atggacgacgacgacaagtagccagatgaaatggaaaaaaaaaaaaaaaaaaaaaaaaa

SEQ ID NO: 1073 - DNA, 59 bp, synthetic construct
  misc_feature 1..59: note = Description of sequence: Primer
  source 1..59: mol_type = other DNA
atggacgacgacgacaagacgacacaatgattccaaaaaaaaaaaaaaaaaaaaaaaaa

SEQ ID NO: 1074 - DNA, 59 bp, synthetic construct
  misc_feature 1..59: note = Description of sequence: Primer
  source 1..59: mol_type = other DNA
atggacgacgacgacaagccatgtgaaagccaggaaaaaaaaaaaaaaaaaaaaaaaaa

SEQ ID NO: 1075 - DNA, 59 bp, synthetic construct
  misc_feature 1..59: note = Description of sequence: Primer
  source 1..59: mol_type = other DNA
atggacgacgacgacaagagggtagaacctcattaaaaaaaaaaaaaaaaaaaaaaaaa

SEQ ID NO: 1076 - DNA, 59 bp, synthetic construct
  misc_feature 1..59: note = Description of sequence: Primer
  source 1..59: mol_type = other DNA
atggacgacgacgacaagaacagaaacccgaagaaaaaaaaaaaaaaaaaaaaaaaaaa

SEQ ID NO: 1077 - DNA, 59 bp, synthetic construct
  misc_feature 1..59: note = Description of sequence: Primer
  source 1..59: mol_type = other DNA
atggacgacgacgacaagtgggtcggaaatttacaaaaaaaaaaaaaaaaaaaaaaaaa

SEQ ID NO: 1078 - DNA, 59 bp, synthetic construct
  misc_feature 1..59: note = Description of sequence: Primer
  source 1..59: mol_type = other DNA
atggacgacgacgacaagccgcagcatacaatccaaaaaaaaaaaaaaaaaaaaaaaaa

SEQ ID NO: 1079 - DNA, 59 bp, synthetic construct
  misc_feature 1..59: note = Description of sequence: Primer
  source 1..59: mol_type = other DNA
atggacgacgacgacaagatccagacaacgttgaaaaaaaaaaaaaaaaaaaaaaaaaa

SEQ ID NO: 1080 - DNA, 59 bp, synthetic construct
  misc_feature 1..59: note = Description of sequence: Primer
  source 1..59: mol_type = other DNA
atggacgacgacgacaagcaaatggcacgcccttaaaaaaaaaaaaaaaaaaaaaaaaa

SEQ ID NO: 1081 - DNA, 59 bp, synthetic construct
  misc_feature 1..59: note = Description of sequence: Primer
  source 1..59: mol_type = other DNA
atggacgacgacgacaagccactcatatacgggtaaaaaaaaaaaaaaaaaaaaaaaaa

SEQ ID NO: 1082 - DNA, 59 bp, synthetic construct
  misc_feature 1..59: note = Description of sequence: Primer
  source 1..59: mol_type = other DNA
atggacgacgacgacaagttgaccgtagaatgtgaaaaaaaaaaaaaaaaaaaaaaaaa

SEQ ID NO: 1083 - DNA, 59 bp, synthetic construct
  misc_feature 1..59: note = Description of sequence: Primer
  source 1..59: mol_type = other DNA
atggacgacgacgacaagtttcatcggccagtggaaaaaaaaaaaaaaaaaaaaaaaaa

SEQ ID NO: 1084 - DNA, 59 bp, synthetic construct
  misc_feature 1..59: note = Description of sequence: Primer
  source 1..59: mol_type = other DNA
atggacgacgacgacaagacgtacccggtagacaaaaaaaaaaaaaaaaaaaaaaaaaa

SEQ ID NO: 1085 - DNA, 59 bp, synthetic construct
  misc_feature 1..59: note = Description of sequence: Primer
  source 1..59: mol_type = other DNA
atggacgacgacgacaaggcagggtggaacctataaaaaaaaaaaaaaaaaaaaaaaaa

SEQ ID NO: 1086 - DNA, 59 bp, synthetic construct
  misc_feature 1..59: note = Description of sequence: Primer
  source 1..59: mol_type = other DNA
atggacgacgacgacaagacgtatttattccgccaaaaaaaaaaaaaaaaaaaaaaaaa

SEQ ID NO: 1087 - DNA, 59 bp, synthetic construct
  misc_feature 1..59: note = Description of sequence: Primer
  source 1..59: mol_type = other DNA
atggacgacgacgacaagtgtggtcactcggaataaaaaaaaaaaaaaaaaaaaaaaaa

SEQ ID NO: 1088 - DNA, 59 bp, synthetic construct
  misc_feature 1..59: note = Description of sequence: Primer
  source 1..59: mol_type = other DNA
atggacgacgacgacaagctggcatgttgtaggtaaaaaaaaaaaaaaaaaaaaaaaaa

SEQ ID NO: 1089 - DNA, 59 bp, synthetic construct
  misc_feature 1..59: note = Description of sequence: Primer
  source 1..59: mol_type = other DNA
atggacgacgacgacaagttaggcaggtgcattgaaaaaaaaaaaaaaaaaaaaaaaaa

SEQ ID NO: 1090 - DNA, 59 bp, synthetic construct
  misc_feature 1..59: note = Description of sequence: Primer
  source 1..59: mol_type = other DNA
atggacgacgacgacaagccagaggaaatggggaaaaaaaaaaaaaaaaaaaaaaaaaa

SEQ ID NO: 1091 - DNA, 59 bp, synthetic construct
  misc_feature 1..59: note = Description of sequence: Primer
  source 1..59: mol_type = other DNA
atggacgacgacgacaagtgtcaacgcatgaaagaaaaaaaaaaaaaaaaaaaaaaaaa

SEQ ID NO: 1092 - DNA, 59 bp, synthetic construct
  misc_feature 1..59: note = Description of sequence: Primer
  source 1..59: mol_type = other DNA
atggacgacgacgacaagcgtttcaatgcagggtaaaaaaaaaaaaaaaaaaaaaaaaa

SEQ ID NO: 1093 - DNA, 59 bp, synthetic construct
  misc_feature 1..59: note = Description of sequence: Primer
  source 1..59: mol_type = other DNA
atggacgacgacgacaaggaccccggtaagtttaaaaaaaaaaaaaaaaaaaaaaaaaa

SEQ ID NO: 1094 - DNA, 59 bp, synthetic construct
  misc_feature 1..59: note = Description of sequence: Primer
  source 1..59: mol_type = other DNA
atggacgacgacgacaagctcattacggacagtgaaaaaaaaaaaaaaaaaaaaaaaaa

SEQ ID NO: 1095 - DNA, 59 bp, synthetic construct
  misc_feature 1..59: note = Description of sequence: Primer
  source 1..59: mol_type = other DNA
atggacgacgacgacaaggggccattagtagtgtaaaaaaaaaaaaaaaaaaaaaaaaa

SEQ ID NO: 1096 - DNA, 59 bp, synthetic construct
  misc_feature 1..59: note = Description of sequence: Primer
  source 1..59: mol_type = other DNA
atggacgacgacgacaagttacacctgggaatccaaaaaaaaaaaaaaaaaaaaaaaaa

SEQ ID NO: 1097 - DNA, 59 bp, synthetic construct
  misc_feature 1..59: note = Description of sequence: Primer
  source 1..59: mol_type = other DNA
atggacgacgacgacaagctctaccttagtggcgaaaaaaaaaaaaaaaaaaaaaaaaa

SEQ ID NO: 1098 - DNA, 59 bp, synthetic construct
  misc_feature 1..59: note = Description of sequence: Primer
  source 1..59: mol_type = other DNA
atggacgacgacgacaaggaattgcggtatcgtcaaaaaaaaaaaaaaaaaaaaaaaaa

SEQ ID NO: 1099 - DNA, 59 bp, synthetic construct
  misc_feature 1..59: note = Description of sequence: Primer
  source 1..59: mol_type = other DNA
atggacgacgacgacaaggcctcaacgcaacacaaaaaaaaaaaaaaaaaaaaaaaaaa

SEQ ID NO: 1100 - DNA, 59 bp, synthetic construct
  misc_feature 1..59: note = Description of sequence: Primer
  source 1..59: mol_type = other DNA
atggacgacgacgacaagagcgactacagctgagaaaaaaaaaaaaaaaaaaaaaaaaa

SEQ ID NO: 1101 - DNA, 59 bp, synthetic construct
  misc_feature 1..59: note = Description of sequence: Primer
  source 1..59: mol_type = other DNA
atggacgacgacgacaagacacacgcaaaacagtaaaaaaaaaaaaaaaaaaaaaaaaa

SEQ ID NO: 1102 - DNA, 59 bp, synthetic construct
  misc_feature 1..59: note = Description of sequence: Primer
  source 1..59: mol_type = other DNA
atggacgacgacgacaaggactaagctgcaatccaaaaaaaaaaaaaaaaaaaaaaaaa

SEQ ID NO: 1103 - DNA, 59 bp, synthetic construct
  misc_feature 1..59: note = Description of sequence: Primer
  source 1..59: mol_type = other DNA
atggacgacgacgacaagcatacggcgatcttagaaaaaaaaaaaaaaaaaaaaaaaaa

SEQ ID NO: 1104 - DNA, 59 bp, synthetic construct
  misc_feature 1..59: note = Description of sequence: Primer
  source 1..59: mol_type = other DNA
atggacgacgacgacaagtatcgtcctatgttcgaaaaaaaaaaaaaaaaaaaaaaaaa

SEQ ID NO: 1105 - DNA, 59 bp, synthetic construct
  misc_feature 1..59: note = Description of sequence: Primer
  source 1..59: mol_type = other DNA
atggacgacgacgacaagtaggtccttgggaatgaaaaaaaaaaaaaaaaaaaaaaaaa

SEQ ID NO: 1106 - DNA, 59 bp, synthetic construct
  misc_feature 1..59: note = Description of sequence: Primer
  source 1..59: mol_type = other DNA
atggacgacgacgacaagctgagactagcactacaaaaaaaaaaaaaaaaaaaaaaaaa

SEQ ID NO: 1107 - DNA, 59 bp, synthetic construct
  misc_feature 1..59: note = Description of sequence: Primer
  source 1..59: mol_type = other DNA
atggacgacgacgacaaggcgtttgagcatccataaaaaaaaaaaaaaaaaaaaaaaaa

SEQ ID NO: 1108 - DNA, 59 bp, synthetic construct
  misc_feature 1..59: note = Description of sequence: Primer
  source 1..59: mol_type = other DNA
atggacgacgacgacaagtaacccaacgcaacctaaaaaaaaaaaaaaaaaaaaaaaaa

SEQ ID NO: 1109 - DNA, 59 bp, synthetic construct
  misc_feature 1..59: note = Description of sequence: Primer
  source 1..59: mol_type = other DNA
atggacgacgacgacaagggagttacgcatctggaaaaaaaaaaaaaaaaaaaaaaaaa

SEQ ID NO: 1110 - DNA, 59 bp, synthetic construct
  misc_feature 1..59: note = Description of sequence: Primer
  source 1..59: mol_type = other DNA
atggacgacgacgacaagtttgggctcggcctataaaaaaaaaaaaaaaaaaaaaaaaa

SEQ ID NO: 1111 - DNA, 59 bp, synthetic construct
  misc_feature 1..59: note = Description of sequence: Primer
  source 1..59: mol_type = other DNA
atggacgacgacgacaagatgatgagtggaagggaaaaaaaaaaaaaaaaaaaaaaaaa

SEQ ID NO: 1112 - DNA, 59 bp, synthetic construct
  misc_feature 1..59: note = Description of sequence: Primer
  source 1..59: mol_type = other DNA
atggacgacgacgacaaggtcagagcactcaaataaaaaaaaaaaaaaaaaaaaaaaaa

SEQ ID NO: 1113 - DNA, 59 bp, synthetic construct
  misc_feature 1..59: note = Description of sequence: Primer
  source 1..59: mol_type = other DNA
atggacgacgacgacaagtgcaagaaacaggcagaaaaaaaaaaaaaaaaaaaaaaaaa

SEQ ID NO: 1114 - DNA, 59 bp, synthetic construct
  misc_feature 1..59: note = Description of sequence: Primer
  source 1..59: mol_type = other DNA
atggacgacgacgacaagatggcgttcaggcttcaaaaaaaaaaaaaaaaaaaaaaaaa

SEQ ID NO: 1115 - DNA, 59 bp, synthetic construct
  misc_feature 1..59: note = Description of sequence: Primer
  source 1..59: mol_type = other DNA
atggacgacgacgacaaggtttagtcgcgatagcaaaaaaaaaaaaaaaaaaaaaaaaa

SEQ ID NO: 1116 - DNA, 59 bp, synthetic construct
  misc_feature 1..59: note = Description of sequence: Primer
  source 1..59: mol_type = other DNA
atggacgacgacgacaagcgcagacccaatgcataaaaaaaaaaaaaaaaaaaaaaaaa

SEQ ID NO: 1117 - DNA, 59 bp, synthetic construct
  misc_feature 1..59: note = Description of sequence: Primer
  source 1..59: mol_type = other DNA
atggacgacgacgacaagtgaaatagtagcgaccaaaaaaaaaaaaaaaaaaaaaaaaa

SEQ ID NO: 1118 - DNA, 59 bp, synthetic construct
  misc_feature 1..59: note = Description of sequence: Primer
  source 1..59: mol_type = other DNA
atggacgacgacgacaagcatcgccggctaaatcaaaaaaaaaaaaaaaaaaaaaaaaa

SEQ ID NO: 1119 - DNA, 59 bp, synthetic construct
  misc_feature 1..59: note = Description of sequence: Primer
  source 1..59: mol_type = other DNA
atggacgacgacgacaagatgtacgggctctctcaaaaaaaaaaaaaaaaaaaaaaaaa

SEQ ID NO: 1120 - DNA, 59 bp, synthetic construct
  misc_feature 1..59: note = Description of sequence: Primer
  source 1..59: mol_type = other DNA
atggacgacgacgacaagccccgttaacatatggaaaaaaaaaaaaaaaaaaaaaaaaa

SEQ ID NO: 1121 - DNA, 59 bp, synthetic construct
  misc_feature 1..59: note = Description of sequence: Primer
  source 1..59: mol_type = other DNA
atggacgacgacgacaaggactcgttggcgctataaaaaaaaaaaaaaaaaaaaaaaaa

SEQ ID NO: 1122 - DNA, 59 bp, synthetic construct
  misc_feature 1..59: note = Description of sequence: Primer
  source 1..59: mol_type = other DNA
atggacgacgacgacaaggcccagacctttaggaaaaaaaaaaaaaaaaaaaaaaaaaa

SEQ ID NO: 1123 - DNA, 59 bp, synthetic construct
  misc_feature 1..59: note = Description of sequence: Primer
  source 1..59: mol_type = other DNA
atggacgacgacgacaagtcccaacaattaccctaaaaaaaaaaaaaaaaaaaaaaaaa

SEQ ID NO: 1124 - DNA, 59 bp, synthetic construct
  misc_feature 1..59: note = Description of sequence: Primer
  source 1..59: mol_type = other DNA
atggacgacgacgacaagcctgtgtgcatctgctaaaaaaaaaaaaaaaaaaaaaaaaa

SEQ ID NO: 1125 - DNA, 59 bp, synthetic construct
  misc_feature 1..59: note = Description of sequence: Primer
  source 1..59: mol_type = other DNA
atggacgacgacgacaagggccgttccttggtaaaaaaaaaaaaaaaaaaaaaaaaaaa

SEQ ID NO: 1126 - DNA, 59 bp, synthetic construct
  misc_feature 1..59: note = Description of sequence: Primer
  source 1..59: mol_type = other DNA
atggacgacgacgacaagagagtaggttgtgttgaaaaaaaaaaaaaaaaaaaaaaaaa

SEQ ID NO: 1127 - DNA, 59 bp, synthetic construct
  misc_feature 1..59: note = Description of sequence: Primer
  source 1..59: mol_type = other DNA
atggacgacgacgacaagactcgataataggacgaaaaaaaaaaaaaaaaaaaaaaaaa

SEQ ID NO: 1128 - DNA, 59 bp, synthetic construct
  misc_feature 1..59: note = Description of sequence: Primer
  source 1..59: mol_type = other DNA
atggacgacgacgacaagcccgacgaatggttataaaaaaaaaaaaaaaaaaaaaaaaa

SEQ ID NO: 1129 - DNA, 59 bp, synthetic construct
  misc_feature 1..59: note = Description of sequence: Primer
  source 1..59: mol_type = other DNA
atggacgacgacgacaagcgaccgaatcattcccaaaaaaaaaaaaaaaaaaaaaaaaa

SEQ ID NO: 1130 - DNA, 59 bp, synthetic construct
  misc_feature 1..59: note = Description of sequence: Primer
  source 1..59: mol_type = other DNA
atggacgacgacgacaaggcctgtagactttgcaaaaaaaaaaaaaaaaaaaaaaaaaa

SEQ ID NO: 1131 - DNA, 59 bp, synthetic construct
  misc_feature 1..59: note = Description of sequence: Primer
  source 1..59: mol_type = other DNA
atggacgacgacgacaagggatccaatacacctaaaaaaaaaaaaaaaaaaaaaaaaaa

SEQ ID NO: 1132 - DNA, 59 bp, synthetic construct
  misc_feature 1..59: note = Description of sequence: Primer
  source 1..59: mol_type = other DNA
atggacgacgacgacaaggggagcgaattgtggaaaaaaaaaaaaaaaaaaaaaaaaaa

SEQ ID NO: 1133 - DNA, 59 bp, synthetic construct
  misc_feature 1..59: note = Description of sequence: Primer
  source 1..59: mol_type = other DNA
atggacgacgacgacaagcgaccttacggcatgaaaaaaaaaaaaaaaaaaaaaaaaaa

SEQ ID NO: 1134 - DNA, 59 bp, synthetic construct
  misc_feature 1..59: note = Description of sequence: Primer
  source 1..59: mol_type = other DNA
atggacgacgacgacaagccgtcacttacgtataaaaaaaaaaaaaaaaaaaaaaaaaa

SEQ ID NO: 1135 - DNA, 59 bp, synthetic construct
  misc_feature 1..59: note = Description of sequence: Primer
  source 1..59: mol_type = other DNA
atggacgacgacgacaagcgcagtttcacgtaacaaaaaaaaaaaaaaaaaaaaaaaaa

SEQ ID NO: 1136 - DNA, 59 bp, synthetic construct
  misc_feature 1..59: note = Description of sequence: Primer
  source 1..59: mol_type = other DNA
atggacgacgacgacaagggcaagctgaatctacaaaaaaaaaaaaaaaaaaaaaaaaa

SEQ ID NO: 1137 - DNA, 59 bp, synthetic construct
  misc_feature 1..59: note = Description of sequence: Primer
  source 1..59: mol_type = other DNA
atggacgacgacgacaagtgcggctacattgccaaaaaaaaaaaaaaaaaaaaaaaaaa

SEQ ID NO: 1138 - DNA, 59 bp, synthetic construct
  misc_feature 1..59: note = Description of sequence: Primer
  source 1..59: mol_type = other DNA
atggacgacgacgacaagatcttctcagtcttcgaaaaaaaaaaaaaaaaaaaaaaaaa

SEQ ID NO: 1139 - DNA, 59 bp, synthetic construct
  misc_feature 1..59: note = Description of sequence: Primer
  source 1..59: mol_type = other DNA
atggacgacgacgacaaggcaggaagatagtcgtaaaaaaaaaaaaaaaaaaaaaaaaa

SEQ ID NO: 1140 - DNA, 59 bp, synthetic construct
  misc_feature 1..59: note = Description of sequence: Primer
  source 1..59: mol_type = other DNA
atggacgacgacgacaaggtgatgtgtctgatacaaaaaaaaaaaaaaaaaaaaaaaaa

SEQ ID NO: 1141 - DNA, 59 bp, synthetic construct
  misc_feature 1..59: note = Description of sequence: Primer
  source 1..59: mol_type = other DNA
atggacgacgacgacaagcgtagccaaagtcgtgaaaaaaaaaaaaaaaaaaaaaaaaa

SEQ ID NO: 1142 - DNA, 59 bp, synthetic construct
  misc_feature 1..59: note = Description of sequence: Primer
  source 1..59: mol_type = other DNA
atggacgacgacgacaagacttcacggaactacgaaaaaaaaaaaaaaaaaaaaaaaaa

SEQ ID NO: 1143 - DNA, 59 bp, synthetic construct
  misc_feature 1..59: note = Description of sequence: Primer
  source 1..59: mol_type = other DNA
atggacgacgacgacaagcgacaaggtatcagttaaaaaaaaaaaaaaaaaaaaaaaaa

SEQ ID NO: 1144 - DNA, 59 bp, synthetic construct
  misc_feature 1..59: note = Description of sequence: Primer
  source 1..59: mol_type = other DNA
atggacgacgacgacaaggtatctagggaagtccaaaaaaaaaaaaaaaaaaaaaaaaa

SEQ ID NO: 1145 - DNA, 59 bp, synthetic construct
  misc_feature 1..59: note = Description of sequence: Primer
  source 1..59: mol_type = other DNA
atggacgacgacgacaagaagtcagcgaggcgttaaaaaaaaaaaaaaaaaaaaaaaaa

SEQ ID NO: 1146 - DNA, 59 bp, synthetic construct
  misc_feature 1..59: note = Description of sequence: Primer
  source 1..59: mol_type = other DNA
atggacgacgacgacaagcgtgtgaccatgatgaaaaaaaaaaaaaaaaaaaaaaaaaa

SEQ ID NO: 1147 - DNA, 59 bp, synthetic construct
  misc_feature 1..59: note = Description of sequence: Primer
  source 1..59: mol_type = other DNA
atggacgacgacgacaagacaaagctttcaggctaaaaaaaaaaaaaaaaaaaaaaaaa

SEQ ID NO: 1148 - DNA, 59 bp, synthetic construct
  misc_feature 1..59: note = Description of sequence: Primer
  source 1..59: mol_type = other DNA
atggacgacgacgacaagttagtcgtcacatcgcaaaaaaaaaaaaaaaaaaaaaaaaa

SEQ ID NO: 1149 - DNA, 59 bp, synthetic construct
  misc_feature 1..59: note = Description of sequence: Primer
  source 1..59: mol_type = other DNA
atggacgacgacgacaagctagaacatgcttcgtaaaaaaaaaaaaaaaaaaaaaaaaa

SEQ ID NO: 1150 - DNA, 59 bp, synthetic construct
  misc_feature 1..59: note = Description of sequence: Primer
  source 1..59: mol_type = other DNA
atggacgacgacgacaagagaaacaacgtcaaggaaaaaaaaaaaaaaaaaaaaaaaaa

SEQ ID NO: 1151 - DNA, 59 bp, synthetic construct
  misc_feature 1..59: note = Description of sequence: Primer
  source 1..59: mol_type = other DNA
atggacgacgacgacaagtctgtactagctgcacaaaaaaaaaaaaaaaaaaaaaaaaa

SEQ ID NO: 1152 - DNA, 59 bp, synthetic construct
  misc_feature 1..59: note = Description of sequence: Primer
  source 1..59: mol_type = other DNA
atggacgacgacgacaagtgcgcattgatggttgaaaaaaaaaaaaaaaaaaaaaaaaa

SEQ ID NO: 1153 - DNA, 59 bp, synthetic construct
  misc_feature 1..59: note = Description of sequence: Primer
  source 1..59: mol_type = other DNA
atggacgacgacgacaagtctacccgactttcccaaaaaaaaaaaaaaaaaaaaaaaaa

SEQ ID NO: 1154 - DNA, 59 bp, synthetic construct
  misc_feature 1..59: note = Description of sequence: Primer
  source 1..59: mol_type = other DNA
atggacgacgacgacaagtcgcttgtttgcttcaaaaaaaaaaaaaaaaaaaaaaaaaa

SEQ ID NO: 1155 - DNA, 59 bp, synthetic construct
  misc_feature 1..59: note = Description of sequence: Primer
  source 1..59: mol_type = other DNA
atggacgacgacgacaagccggtcaagcagtacaaaaaaaaaaaaaaaaaaaaaaaaaa

SEQ ID NO: 1156 - DNA, 59 bp, synthetic construct
  misc_feature 1..59: note = Description of sequence: Primer
  source 1..59: mol_type = other DNA
atggacgacgacgacaagttctttgaggcactagaaaaaaaaaaaaaaaaaaaaaaaaa

SEQ ID NO: 1157 - DNA, 59 bp, synthetic construct
  misc_feature 1..59: note = Description of sequence: Primer
  source 1..59: mol_type = other DNA
atggacgacgacgacaagaaaagcacagttgcctaaaaaaaaaaaaaaaaaaaaaaaaa

SEQ ID NO: 1158 - DNA, 59 bp, synthetic construct
  misc_feature 1..59: note = Description of sequence: Primer
  source 1..59: mol_type = other DNA
atggacgacgacgacaagcttctacctcgaggataaaaaaaaaaaaaaaaaaaaaaaaa

SEQ ID NO: 1159 - DNA, 59 bp, synthetic construct
  misc_feature 1..59: note = Description of sequence: Primer
  source 1..59: mol_type = other DNA
atggacgacgacgacaagggttccaaccttatcaaaaaaaaaaaaaaaaaaaaaaaaaa

SEQ ID NO: 1160 - DNA, 59 bp, synthetic construct
  misc_feature 1..59: note = Description of sequence: Primer
  source 1..59: mol_type = other DNA
atggacgacgacgacaagctatgaccgggtgttcaaaaaaaaaaaaaaaaaaaaaaaaa

SEQ ID NO: 1161 - DNA, 59 bp, synthetic construct
  misc_feature 1..59: note = Description of sequence: Primer
  source 1..59: mol_type = other DNA
atggacgacgacgacaaggagatcaggagttctaaaaaaaaaaaaaaaaaaaaaaaaaa

SEQ ID NO: 1162 - DNA, 59 bp, synthetic construct
  misc_feature 1..59: note = Description of sequence: Primer
  source 1..59: mol_type = other DNA
atggacgacgacgacaagcggagatctgcagactaaaaaaaaaaaaaaaaaaaaaaaaa

SEQ ID NO: 1163 - DNA, 59 bp, synthetic construct
  misc_feature 1..59: note = Description of sequence: Primer
  source 1..59: mol_type = other DNA
atggacgacgacgacaagtcttgcgatatgtctcaaaaaaaaaaaaaaaaaaaaaaaaa

SEQ ID NO: 1164 - DNA, 59 bp, synthetic construct
  misc_feature 1..59: note = Description of sequence: Primer
  source 1..59: mol_type = other DNA
atggacgacgacgacaagctgtaacaactcggttaaaaaaaaaaaaaaaaaaaaaaaaa

SEQ ID NO: 1165 - DNA, 59 bp, synthetic construct
  misc_feature 1..59: note = Description of sequence: Primer
  source 1..59: mol_type = other DNA
atggacgacgacgacaagggttacacgacttgctaaaaaaaaaaaaaaaaaaaaaaaaa

SEQ ID NO: 1166 - DNA, 59 bp, synthetic construct
  misc_feature 1..59: note = Description of sequence: Primer
  source 1..59: mol_type = other DNA
atggacgacgacgacaagagagggaacattcgtcaaaaaaaaaaaaaaaaaaaaaaaaa

SEQ ID NO: 1167 - DNA, 59 bp, synthetic construct
  misc_feature 1..59: note = Description of sequence: Primer
  source 1..59: mol_type = other DNA
atggacgacgacgacaaggggtattgaacaaacgaaaaaaaaaaaaaaaaaaaaaaaaa

SEQ ID NO: 1168 - DNA, 59 bp, synthetic construct
  misc_feature 1..59: note = Description of sequence: Primer
  source 1..59: mol_type = other DNA
atggacgacgacgacaagagtgccagactggcaaaaaaaaaaaaaaaaaaaaaaaaaaa

SEQ ID NO: 1169 - DNA, 59 bp, synthetic construct
  misc_feature 1..59: note = Description of sequence: Primer
  source 1..59: mol_type = other DNA
atggacgacgacgacaagggtagatgacgaggagaaaaaaaaaaaaaaaaaaaaaaaaa

SEQ ID NO: 1170 - DNA, 59 bp, synthetic construct
  misc_feature 1..59: note = Description of sequence: Primer
  source 1..59: mol_type = other DNA
atggacgacgacgacaagcgtcaattctcagccgaaaaaaaaaaaaaaaaaaaaaaaaa

SEQ ID NO: 1171 - DNA, 59 bp, synthetic construct
  misc_feature 1..59: note = Description of sequence: Primer
  source 1..59: mol_type = other DNA
atggacgacgacgacaagacgggagtaagtgtcaaaaaaaaaaaaaaaaaaaaaaaaaa

SEQ ID NO: 1172 - DNA, 59 bp, synthetic construct
  misc_feature 1..59: note = Description of sequence: Primer
  source 1..59: mol_type = other DNA
atggacgacgacgacaagaacacttccagtgtcaaaaaaaaaaaaaaaaaaaaaaaaaa

SEQ ID NO: 1173 - DNA, 59 bp, synthetic construct
  misc_feature 1..59: note = Description of sequence: Primer
  source 1..59: mol_type = other DNA
atggacgacgacgacaagcatggcggccatttcaaaaaaaaaaaaaaaaaaaaaaaaaa

SEQ ID NO: 1174 - DNA, 59 bp, synthetic construct
  misc_feature 1..59: note = Description of sequence: Primer
  source 1..59: mol_type = other DNA
atggacgacgacgacaaggctgatctggattgccaaaaaaaaaaaaaaaaaaaaaaaaa

SEQ ID NO: 1175 - DNA, 59 bp, synthetic construct
  misc_feature 1..59: note = Description of sequence: Primer
  source 1..59: mol_type = other DNA
atggacgacgacgacaagcgttaagtgcggtcctaaaaaaaaaaaaaaaaaaaaaaaaa

SEQ ID NO: 1176 - DNA, 59 bp, synthetic construct
  misc_feature 1..59: note = Description of sequence: Primer
  source 1..59: mol_type = other DNA
atggacgacgacgacaaggcccatagtgaaacggaaaaaaaaaaaaaaaaaaaaaaaaa

SEQ ID NO: 1177 - DNA, 59 bp, synthetic construct
  misc_feature 1..59: note = Description of sequence: Primer
  source 1..59: mol_type = other DNA
atggacgacgacgacaagcagaataggcaagcttaaaaaaaaaaaaaaaaaaaaaaaaa

SEQ ID NO: 1178 - DNA, 59 bp, synthetic construct
  misc_feature 1..59: note = Description of sequence: Primer
  source 1..59: mol_type = other DNA
atggacgacgacgacaagtcatcgcacgactgttaaaaaaaaaaaaaaaaaaaaaaaaa

SEQ ID NO: 1179 - DNA, 59 bp, synthetic construct
  misc_feature 1..59: note = Description of sequence: Primer
  source 1..59: mol_type = other DNA
atggacgacgacgacaagtccacacttgctagggaaaaaaaaaaaaaaaaaaaaaaaaa

SEQ ID NO: 1180 - DNA, 59 bp, synthetic construct
  misc_feature 1..59: note = Description of sequence: Primer
  source 1..59: mol_type = other DNA
atggacgacgacgacaagtaataatagcacgcccaaaaaaaaaaaaaaaaaaaaaaaaa

SEQ ID NO: 1181 - DNA, 59 bp, synthetic construct
  misc_feature 1..59: note = Description of sequence: Primer
  source 1..59: mol_type = other DNA
atggacgacgacgacaaggttcaacgccgcttacaaaaaaaaaaaaaaaaaaaaaaaaa

SEQ ID NO: 1182 - DNA, 59 bp, synthetic construct
  misc_feature 1..59: note = Description of sequence: Primer
  source 1..59: mol_type = other DNA
atggacgacgacgacaagtcgagctattcccataaaaaaaaaaaaaaaaaaaaaaaaaa

SEQ ID NO: 1183 - DNA, 59 bp, synthetic construct
  misc_feature 1..59: note = Description of sequence: Primer
  source 1..59: mol_type = other DNA
atggacgacgacgacaagtcccagtctggacatcaaaaaaaaaaaaaaaaaaaaaaaaa

SEQ ID NO: 1184 - DNA, 59 bp, synthetic construct
  misc_feature 1..59: note = Description of sequence: Primer
  source 1..59: mol_type = other DNA
atggacgacgacgacaagccgagatcaaacttcgaaaaaaaaaaaaaaaaaaaaaaaaa

SEQ ID NO: 1185 - DNA, 59 bp, synthetic construct
  misc_feature 1..59: note = Description of sequence: Primer
  source 1..59: mol_type = other DNA
atggacgacgacgacaagacgctctaatcgtcgcaaaaaaaaaaaaaaaaaaaaaaaaa

SEQ ID NO: 1186 - DNA, 59 bp, synthetic construct
  misc_feature 1..59: note = Description of sequence: Primer
  source 1..59: mol_type = other DNA
atggacgacgacgacaagggtgttaacgagaacgaaaaaaaaaaaaaaaaaaaaaaaaa

SEQ ID NO: 1187 - DNA, 59 bp, synthetic construct
  misc_feature 1..59: note = Description of sequence: Primer
  source 1..59: mol_type = other DNA
atggacgacgacgacaagctctatacgggtcagaaaaaaaaaaaaaaaaaaaaaaaaaa

SEQ ID NO: 1188 - DNA, 59 bp, synthetic construct
  misc_feature 1..59: note = Description of sequence: Primer
  source 1..59: mol_type = other DNA
atggacgacgacgacaagcatctcccctgtcattaaaaaaaaaaaaaaaaaaaaaaaaa

SEQ ID NO: 1189 - DNA, 59 bp, synthetic construct
  misc_feature 1..59: note = Description of sequence: Primer
  source 1..59: mol_type = other DNA
atggacgacgacgacaaggcagatgtgtcggttgaaaaaaaaaaaaaaaaaaaaaaaaa

SEQ ID NO: 1190 - DNA, 59 bp, synthetic construct
  misc_feature 1..59: note = Description of sequence: Primer
  source 1..59: mol_type = other DNA
atggacgacgacgacaagacgaacttcccttatgaaaaaaaaaaaaaaaaaaaaaaaaa

SEQ ID NO: 1191 - DNA, 59 bp, synthetic construct
  misc_feature 1..59: note = Description of sequence: Primer
  source 1..59: mol_type = other DNA
atggacgacgacgacaaggagtcactccgtcactaaaaaaaaaaaaaaaaaaaaaaaaa

SEQ ID NO: 1192 - DNA, 59 bp, synthetic construct
  misc_feature 1..59: note = Description of sequence: Primer
  source 1..59: mol_type = other DNA
atggacgacgacgacaagttcgagacgtgagcgtaaaaaaaaaaaaaaaaaaaaaaaaa

SEQ ID NO: 1193 - DNA, 59 bp, synthetic construct
  misc_feature 1..59: note = Description of sequence: Primer
  source 1..59: mol_type = other DNA
atggacgacgacgacaagaatactgtggcacctcaaaaaaaaaaaaaaaaaaaaaaaaa

SEQ ID NO: 1194 - DNA, 59 bp, synthetic construct
  misc_feature 1..59: note = Description of sequence: Primer
  source 1..59: mol_type = other DNA
atggacgacgacgacaagcaaagttcagtgtgagaaaaaaaaaaaaaaaaaaaaaaaaa

SEQ ID NO: 1195 - DNA, 59 bp, synthetic construct
  misc_feature 1..59: note = Description of sequence: Primer
  source 1..59: mol_type = other DNA
atggacgacgacgacaagatttgccattgccttcaaaaaaaaaaaaaaaaaaaaaaaaa

SEQ ID NO: 1196 - DNA, 59 bp, synthetic construct
  misc_feature 1..59: note = Description of sequence: Primer
  source 1..59: mol_type = other DNA
atggacgacgacgacaagacgtaccatatgcgataaaaaaaaaaaaaaaaaaaaaaaaa

SEQ ID NO: 1197 - DNA, 59 bp, synthetic construct
  misc_feature 1..59: note = Description of sequence: Primer
  source 1..59: mol_type = other DNA
atggacgacgacgacaagcccagtcgggaattataaaaaaaaaaaaaaaaaaaaaaaaa

SEQ ID NO: 1198 - DNA, 59 bp, synthetic construct
  misc_feature 1..59: note = Description of sequence: Primer
  source 1..59: mol_type = other DNA
atggacgacgacgacaaggcaatatctatgggccaaaaaaaaaaaaaaaaaaaaaaaaa

SEQ ID NO: 1199 - DNA, 59 bp, synthetic construct
  misc_feature 1..59: note = Description of sequence: Primer
  source 1..59: mol_type = other DNA
atggacgacgacgacaagcttgtcctcaagtgagaaaaaaaaaaaaaaaaaaaaaaaaa

SEQ ID NO: 1200 - DNA, 59 bp, synthetic construct
  misc_feature 1..59: note = Description of sequence: Primer
  source 1..59: mol_type = other DNA
atggacgacgacgacaagttgctaaacatgggcaaaaaaaaaaaaaaaaaaaaaaaaaa

SEQ ID NO: 1201 - DNA, 59 bp, synthetic construct
  misc_feature 1..59: note = Description of sequence: Primer
  source 1..59: mol_type = other DNA
atggacgacgacgacaagtcagagtctaataggcaaaaaaaaaaaaaaaaaaaaaaaaa

SEQ ID NO: 1202 - DNA, 59 bp, synthetic construct
  misc_feature 1..59: note = Description of sequence: Primer
  source 1..59: mol_type = other DNA
atggacgacgacgacaaggtggttcccgtttgataaaaaaaaaaaaaaaaaaaaaaaaa

SEQ ID NO: 1203 - DNA, 59 bp, synthetic construct
  misc_feature 1..59: note = Description of sequence: Primer
  source 1..59: mol_type = other DNA
atggacgacgacgacaaggtgtcctgatagggataaaaaaaaaaaaaaaaaaaaaaaaa

SEQ ID NO: 1204 - DNA, 59 bp, synthetic construct
  misc_feature 1..59: note = Description of sequence: Primer
  source 1..59: mol_type = other DNA
atggacgacgacgacaagcttttccagcataccgaaaaaaaaaaaaaaaaaaaaaaaaa

SEQ ID NO: 1205 - DNA, 59 bp, synthetic construct
  misc_feature 1..59: note = Description of sequence: Primer
  source 1..59: mol_type = other DNA
atggacgacgacgacaagagtcacggatttctagaaaaaaaaaaaaaaaaaaaaaaaaa

SEQ ID NO: 1206 - DNA, 59 bp, synthetic construct
  misc_feature 1..59: note = Description of sequence: Primer
  source 1..59: mol_type = other DNA
atggacgacgacgacaagatgggtcacaaccagtaaaaaaaaaaaaaaaaaaaaaaaaa

SEQ ID NO: 1207 - DNA, 59 bp, synthetic construct
  misc_feature 1..59: note = Description of sequence: Primer
  source 1..59: mol_type = other DNA
atggacgacgacgacaaggcacaggacagtaactaaaaaaaaaaaaaaaaaaaaaaaaa

SEQ ID NO: 1208 - DNA, 59 bp, synthetic construct
  misc_feature 1..59: note = Description of sequence: Primer
  source 1..59: mol_type = other DNA
atggacgacgacgacaagcatctacaacggaacaaaaaaaaaaaaaaaaaaaaaaaaaa

SEQ ID NO: 1209 - DNA, 59 bp, synthetic construct
  misc_feature 1..59: note = Description of sequence: Primer
  source 1..59: mol_type = other DNA
atggacgacgacgacaagataagaccgtaaaggcaaaaaaaaaaaaaaaaaaaaaaaaa

SEQ ID NO: 1210 - DNA, 59 bp, synthetic construct
  misc_feature 1..59: note = Description of sequence: Primer
  source 1..59: mol_type = other DNA
atggacgacgacgacaaggctcgcttcgctagttaaaaaaaaaaaaaaaaaaaaaaaaa

SEQ ID NO: 1211 - DNA, 59 bp, synthetic construct
  misc_feature 1..59: note = Description of sequence: Primer
  source 1..59: mol_type = other DNA
atggacgacgacgacaaggaaagcctataccactaaaaaaaaaaaaaaaaaaaaaaaaa

SEQ ID NO: 1212 - DNA, 59 bp, synthetic construct
  misc_feature 1..59: note = Description of sequence: Primer
  source 1..59: mol_type = other DNA
atggacgacgacgacaagggtaaagacggtgtccaaaaaaaaaaaaaaaaaaaaaaaaa

SEQ ID NO: 1213 - DNA, 59 bp, synthetic construct
  misc_feature 1..59: note = Description of sequence: Primer
  source 1..59: mol_type = other DNA
atggacgacgacgacaagttgttcggcctgaggtaaaaaaaaaaaaaaaaaaaaaaaaa

SEQ ID NO: 1214 - DNA, 59 bp, synthetic construct
  misc_feature 1..59: note = Description of sequence: Primer
  source 1..59: mol_type = other DNA
atggacgacgacgacaaggtcggctagagaacacaaaaaaaaaaaaaaaaaaaaaaaaa

SEQ ID NO: 1215 - DNA, 59 bp, synthetic construct
  misc_feature 1..59: note = Description of sequence: Primer
  source 1..59: mol_type = other DNA
atggacgacgacgacaagagagtccgtgcgatataaaaaaaaaaaaaaaaaaaaaaaaa

SEQ ID NO: 1216 - DNA, 59 bp, synthetic construct
  misc_feature 1..59: note = Description of sequence: Primer
  source 1..59: mol_type = other DNA
atggacgacgacgacaagatatcgcgcagtaccaaaaaaaaaaaaaaaaaaaaaaaaaa

SEQ ID NO: 1217 - DNA, 59 bp, synthetic construct
  misc_feature 1..59: note = Description of sequence: Primer
  source 1..59: mol_type = other DNA
atggacgacgacgacaagcaaagctacgggctttaaaaaaaaaaaaaaaaaaaaaaaaa

SEQ ID NO: 1218 - DNA, 59 bp, synthetic construct
  misc_feature 1..59: note = Description of sequence: Primer
  source 1..59: mol_type = other DNA
atggacgacgacgacaagaccgcaaaccacatttaaaaaaaaaaaaaaaaaaaaaaaaa

SEQ ID NO: 1219 - DNA, 59 bp, synthetic construct
  misc_feature 1..59: note = Description of sequence: Primer
  source 1..59: mol_type = other DNA
atggacgacgacgacaagcggttaagctgattgtaaaaaaaaaaaaaaaaaaaaaaaaa

SEQ ID NO: 1220 - DNA, 59 bp, synthetic construct
  misc_feature 1..59: note = Description of sequence: Primer
  source 1..59: mol_type = other DNA
atggacgacgacgacaagtttgtctcacgtccagaaaaaaaaaaaaaaaaaaaaaaaaa

SEQ ID NO: 1221 - DNA, 59 bp, synthetic construct
  misc_feature 1..59: note = Description of sequence: Primer
  source 1..59: mol_type = other DNA
atggacgacgacgacaagcttccgcgagcaaaagaaaaaaaaaaaaaaaaaaaaaaaaa

SEQ ID NO: 1222 - DNA, 59 bp, synthetic construct
  misc_feature 1..59: note = Description of sequence: Primer
  source 1..59: mol_type = other DNA
atggacgacgacgacaagcaagtcggatctactaaaaaaaaaaaaaaaaaaaaaaaaaa

SEQ ID NO: 1223 - DNA, 59 bp, synthetic construct
  misc_feature 1..59: note = Description of sequence: Primer
  source 1..59: mol_type = other DNA
atggacgacgacgacaagaatactcgcgacggctaaaaaaaaaaaaaaaaaaaaaaaaa

SEQ ID NO: 1224 - DNA, 59 bp, synthetic construct
  misc_feature 1..59: note = Description of sequence: Primer
  source 1..59: mol_type = other DNA
atggacgacgacgacaagcgcctatcgccgttttaaaaaaaaaaaaaaaaaaaaaaaaa

SEQ ID NO: 1225 - DNA, 59 bp, synthetic construct
  misc_feature 1..59: note = Description of sequence: Primer
  source 1..59: mol_type = other DNA
atggacgacgacgacaaggtttactactacacgcaaaaaaaaaaaaaaaaaaaaaaaaa

SEQ ID NO: 1226 - DNA, 59 bp, synthetic construct
  misc_feature 1..59: note = Description of sequence: Primer
  source 1..59: mol_type = other DNA
atggacgacgacgacaaggttaaggttacgtcacaaaaaaaaaaaaaaaaaaaaaaaaa

SEQ ID NO: 1227 - DNA, 59 bp, synthetic construct
  misc_feature 1..59: note = Description of sequence: Primer
  source 1..59: mol_type = other DNA
atggacgacgacgacaagagctgttcacacgaccaaaaaaaaaaaaaaaaaaaaaaaaa

SEQ ID NO: 1228 - DNA, 59 bp, synthetic construct
  misc_feature 1..59: note = Description of sequence: Primer
  source 1..59: mol_type = other DNA
atggacgacgacgacaagcaatactctctggcataaaaaaaaaaaaaaaaaaaaaaaaa

SEQ ID NO: 1229 - DNA, 59 bp, synthetic construct
  misc_feature 1..59: note = Description of sequence: Primer
  source 1..59: mol_type = other DNA
atggacgacgacgacaagttccagtgcatgcgttaaaaaaaaaaaaaaaaaaaaaaaaa

SEQ ID NO: 1230 - DNA, 59 bp, synthetic construct
  misc_feature 1..59: note = Description of sequence: Primer
  source 1..59: mol_type = other DNA
atggacgacgacgacaagtgccttttccccgcataaaaaaaaaaaaaaaaaaaaaaaaa

SEQ ID NO: 1231 - DNA, 59 bp, synthetic construct
  misc_feature 1..59: note = Description of sequence: Primer
  source 1..59: mol_type = other DNA
atggacgacgacgacaagcctaacccaaggaagcaaaaaaaaaaaaaaaaaaaaaaaaa

SEQ ID NO: 1232 - DNA, 59 bp, synthetic construct
  misc_feature 1..59: note = Description of sequence: Primer
  source 1..59: mol_type = other DNA
atggacgacgacgacaagtagtcttacatctccgaaaaaaaaaaaaaaaaaaaaaaaaa

SEQ ID NO: 1233 - DNA, 59 bp, synthetic construct
  misc_feature 1..59: note = Description of sequence: Primer
  source 1..59: mol_type = other DNA
atggacgacgacgacaagctagggtaggctatagaaaaaaaaaaaaaaaaaaaaaaaaa

SEQ ID NO: 1234 - DNA, 59 bp, synthetic construct
  misc_feature 1..59: note = Description of sequence: Primer
  source 1..59: mol_type = other DNA
atggacgacgacgacaagtcttgtggaggcttttaaaaaaaaaaaaaaaaaaaaaaaaa

SEQ ID NO: 1235 - DNA, 59 bp, synthetic construct
  misc_feature 1..59: note = Description of sequence: Primer
  source 1..59: mol_type = other DNA
atggacgacgacgacaagggaacgagaattacgtaaaaaaaaaaaaaaaaaaaaaaaaa

SEQ ID NO: 1236 - DNA, 59 bp, synthetic construct
  misc_feature 1..59: note = Description of sequence: Primer
  source 1..59: mol_type = other DNA
atggacgacgacgacaagggtaagaaatgcttggaaaaaaaaaaaaaaaaaaaaaaaaa

SEQ ID NO: 1237 - DNA, 59 bp, synthetic construct
  misc_feature 1..59: note = Description of sequence: Primer
  source 1..59: mol_type = other DNA
atggacgacgacgacaagagtcttcaccaactcaaaaaaaaaaaaaaaaaaaaaaaaaa

SEQ ID NO: 1238 - DNA, 59 bp, synthetic construct
  misc_feature 1..59: note = Description of sequence: Primer
  source 1..59: mol_type = other DNA
atggacgacgacgacaagtcaacaaagccttgctaaaaaaaaaaaaaaaaaaaaaaaaa

SEQ ID NO: 1239 - DNA, 59 bp, synthetic construct
  misc_feature 1..59: note = Description of sequence: Primer
  source 1..59: mol_type = other DNA
atggacgacgacgacaagggttgctagctctaagaaaaaaaaaaaaaaaaaaaaaaaaa

SEQ ID NO: 1240 - DNA, 59 bp, synthetic construct
  misc_feature 1..59: note = Description of sequence: Primer
  source 1..59: mol_type = other DNA
atggacgacgacgacaagcttaccttgttcacctaaaaaaaaaaaaaaaaaaaaaaaaa

SEQ ID NO: 1241 - DNA, 59 bp, synthetic construct
  misc_feature 1..59: note = Description of sequence: Primer
  source 1..59: mol_type = other DNA
atggacgacgacgacaagaacatgtagaggggtgaaaaaaaaaaaaaaaaaaaaaaaaa

SEQ ID NO: 1242 - DNA, 59 bp, synthetic construct
  misc_feature 1..59: note = Description of sequence: Primer
  source 1..59: mol_type = other DNA
atggacgacgacgacaagttgggttccttcacttaaaaaaaaaaaaaaaaaaaaaaaaa

SEQ ID NO: 1243 - DNA, 59 bp, synthetic construct
  misc_feature 1..59: note = Description of sequence: Primer
  source 1..59: mol_type = other DNA
atggacgacgacgacaaggcaccatgctacagtgaaaaaaaaaaaaaaaaaaaaaaaaa

SEQ ID NO: 1244 - DNA, 59 bp, synthetic construct
  misc_feature 1..59: note = Description of sequence: Primer
  source 1..59: mol_type = other DNA
atggacgacgacgacaagatgcatgagaaagggaaaaaaaaaaaaaaaaaaaaaaaaaa

SEQ ID NO: 1245 - DNA, 59 bp, synthetic construct
  misc_feature 1..59: note = Description of sequence: Primer
  source 1..59: mol_type = other DNA
atggacgacgacgacaagccactagtgagatagaaaaaaaaaaaaaaaaaaaaaaaaaa

SEQ ID NO: 1246 - DNA, 59 bp, synthetic construct
  misc_feature 1..59: note = Description of sequence: Primer
  source 1..59: mol_type = other DNA
atggacgacgacgacaagcgacacaccaatattgaaaaaaaaaaaaaaaaaaaaaaaaa

SEQ ID NO: 1247 - DNA, 59 bp, synthetic construct
  misc_feature 1..59: note = Description of sequence: Primer
  source 1..59: mol_type = other DNA
atggacgacgacgacaagcagatagtcttgtcacaaaaaaaaaaaaaaaaaaaaaaaaa

SEQ ID NO: 1248 - DNA, 59 bp, synthetic construct
  misc_feature 1..59: note = Description of sequence: Primer
  source 1..59: mol_type = other DNA
atggacgacgacgacaagttgtcgagggatacttaaaaaaaaaaaaaaaaaaaaaaaaa

SEQ ID NO: 1249 - DNA, 59 bp, synthetic construct
  misc_feature 1..59: note = Description of sequence: Primer
  source 1..59: mol_type = other DNA
atggacgacgacgacaagcgttgagcacctttgcaaaaaaaaaaaaaaaaaaaaaaaaa

SEQ ID NO: 1250 - DNA, 59 bp, synthetic construct
  misc_feature 1..59: note = Description of sequence: Primer
  source 1..59: mol_type = other DNA
atggacgacgacgacaagaacagagaagaatcgcaaaaaaaaaaaaaaaaaaaaaaaaa

SEQ ID NO: 1251 - DNA, 59 bp, synthetic construct
  misc_feature 1..59: note = Description of sequence: Primer
  source 1..59: mol_type = other DNA
atggacgacgacgacaaggcgtgcttgtactccaaaaaaaaaaaaaaaaaaaaaaaaaa

SEQ ID NO: 1252 - DNA, 59 bp, synthetic construct
  misc_feature 1..59: note = Description of sequence: Primer
  source 1..59: mol_type = other DNA
atggacgacgacgacaagttcacgcctcattgataaaaaaaaaaaaaaaaaaaaaaaaa

SEQ ID NO: 1253 - DNA, 59 bp, synthetic construct
  misc_feature 1..59: note = Description of sequence: Primer
  source 1..59: mol_type = other DNA
atggacgacgacgacaagccggcatccgttatacaaaaaaaaaaaaaaaaaaaaaaaaa

SEQ ID NO: 1254 - DNA, 59 bp, synthetic construct
  misc_feature 1..59: note = Description of sequence: Primer
  source 1..59: mol_type = other DNA
atggacgacgacgacaagtgagcgttaaccagataaaaaaaaaaaaaaaaaaaaaaaaa

SEQ ID NO: 1255 - DNA, 59 bp, synthetic construct
  misc_feature 1..59: note = Description of sequence: Primer
  source 1..59: mol_type = other DNA
atggacgacgacgacaagtgccgattagcctacgaaaaaaaaaaaaaaaaaaaaaaaaa

SEQ ID NO: 1256 - DNA, 59 bp, synthetic construct
  misc_feature 1..59: note = Description of sequence: Primer
  source 1..59: mol_type = other DNA
atggacgacgacgacaagtgttcgtgtggcgcataaaaaaaaaaaaaaaaaaaaaaaaa

SEQ ID NO: 1257 - DNA, 59 bp, synthetic construct
  misc_feature 1..59: note = Description of sequence: Primer
  source 1..59: mol_type = other DNA
atggacgacgacgacaagaccggtagcttatcacaaaaaaaaaaaaaaaaaaaaaaaaa

SEQ ID NO: 1258 - DNA, 59 bp, synthetic construct
  misc_feature 1..59: note = Description of sequence: Primer
  source 1..59: mol_type = other DNA
atggacgacgacgacaagacgggagctcactgataaaaaaaaaaaaaaaaaaaaaaaaa

SEQ ID NO: 1259 - DNA, 59 bp, synthetic construct
  misc_feature 1..59: note = Description of sequence: Primer
  source 1..59: mol_type = other DNA
atggacgacgacgacaaggtataactcgagagctaaaaaaaaaaaaaaaaaaaaaaaaa

SEQ ID NO: 1260 - DNA, 59 bp, synthetic construct
  misc_feature 1..59: note = Description of sequence: Primer
  source 1..59: mol_type = other DNA
atggacgacgacgacaagcccatcggttatccctaaaaaaaaaaaaaaaaaaaaaaaaa

SEQ ID NO: 1261 - DNA, 59 bp, synthetic construct
  misc_feature 1..59: note = Description of sequence: Primer
  source 1..59: mol_type = other DNA
atggacgacgacgacaagagacatgccccgctataaaaaaaaaaaaaaaaaaaaaaaaa

SEQ ID NO: 1262 - DNA, 59 bp, synthetic construct
  misc_feature 1..59: note = Description of sequence: Primer
  source 1..59: mol_type = other DNA
atggacgacgacgacaaggtttctaatcgtccgcaaaaaaaaaaaaaaaaaaaaaaaaa

SEQ ID NO: 1263 - DNA, 59 bp, synthetic construct
  misc_feature 1..59: note = Description of sequence: Primer
  source 1..59: mol_type = other DNA
atggacgacgacgacaaggaatgaagcttcgacaaaaaaaaaaaaaaaaaaaaaaaaaa

SEQ ID NO: 1264 - DNA, 59 bp, synthetic construct
  misc_feature 1..59: note = Description of sequence: Primer
  source 1..59: mol_type = other DNA
atggacgacgacgacaaggcgattgacccattgaaaaaaaaaaaaaaaaaaaaaaaaaa

SEQ ID NO: 1265 - DNA, 59 bp, synthetic construct
  misc_feature 1..59: note = Description of sequence: Primer
  source 1..59: mol_type = other DNA
atggacgacgacgacaaggttggtcctctagagaaaaaaaaaaaaaaaaaaaaaaaaaa

SEQ ID NO: 1266 - DNA, 59 bp, synthetic construct
  misc_feature 1..59: note = Description of sequence: Primer
  source 1..59: mol_type = other DNA
atggacgacgacgacaagttgttattcgcccctcaaaaaaaaaaaaaaaaaaaaaaaaa

SEQ ID NO: 1267 - DNA, 59 bp, synthetic construct
  misc_feature 1..59: note = Description of sequence: Primer
  source 1..59: mol_type = other DNA
atggacgacgacgacaagattggtgtgtagagctaaaaaaaaaaaaaaaaaaaaaaaaa

SEQ ID NO: 1268 - DNA, 59 bp, synthetic construct
  misc_feature 1..59: note = Description of sequence: Primer
  source 1..59: mol_type = other DNA
atggacgacgacgacaagtgccggatgtaattgcaaaaaaaaaaaaaaaaaaaaaaaaa

SEQ ID NO: 1269 - DNA, 59 bp, synthetic construct
  misc_feature 1..59: note = Description of sequence: Primer
  source 1..59: mol_type = other DNA
atggacgacgacgacaagagaaacgaaacgttcgaaaaaaaaaaaaaaaaaaaaaaaaa

SEQ ID NO: 1270 - DNA, 59 bp, synthetic construct
  misc_feature 1..59: note = Description of sequence: Primer
  source 1..59: mol_type = other DNA
atggacgacgacgacaagcccaaggatggtgctaaaaaaaaaaaaaaaaaaaaaaaaaa

SEQ ID NO: 1271 - DNA, 59 bp, synthetic construct
  misc_feature 1..59: note = Description of sequence: Primer
  source 1..59: mol_type = other DNA
atggacgacgacgacaagggaatgggcgagttcaaaaaaaaaaaaaaaaaaaaaaaaaa

SEQ ID NO: 1272 - DNA, 59 bp, synthetic construct
  misc_feature 1..59: note = Description of sequence: Primer
  source 1..59: mol_type = other DNA
atggacgacgacgacaagccagcttacccgtattaaaaaaaaaaaaaaaaaaaaaaaaa

SEQ ID NO: 1273 - DNA, 59 bp, synthetic construct
  misc_feature 1..59: note = Description of sequence: Primer
  source 1..59: mol_type = other DNA
atggacgacgacgacaagtacgctttaccgtcccaaaaaaaaaaaaaaaaaaaaaaaaa

SEQ ID NO: 1274 - DNA, 59 bp, synthetic construct
  misc_feature 1..59: note = Description of sequence: Primer
  source 1..59: mol_type = other DNA
atggacgacgacgacaaggcgcttcgattctattaaaaaaaaaaaaaaaaaaaaaaaaa

SEQ ID NO: 1275 - DNA, 59 bp, synthetic construct
  misc_feature 1..59: note = Description of sequence: Primer
  source 1..59: mol_type = other DNA
atggacgacgacgacaaggcaagtgtgggaacgtaaaaaaaaaaaaaaaaaaaaaaaaa

SEQ ID NO: 1276 - DNA, 59 bp, synthetic construct
  misc_feature 1..59: note = Description of sequence: Primer
  source 1..59: mol_type = other DNA
atggacgacgacgacaaggaagctcaattggccaaaaaaaaaaaaaaaaaaaaaaaaaa

SEQ ID NO: 1277 - DNA, 59 bp, synthetic construct
  misc_feature 1..59: note = Description of sequence: Primer
  source 1..59: mol_type = other DNA
atggacgacgacgacaagttttccaccctgcatcaaaaaaaaaaaaaaaaaaaaaaaaa

SEQ ID NO: 1278 - DNA, 59 bp, synthetic construct
  misc_feature 1..59: note = Description of sequence: Primer
  source 1..59: mol_type = other DNA
atggacgacgacgacaaggtcttcgggtgagtttaaaaaaaaaaaaaaaaaaaaaaaaa

SEQ ID NO: 1279 - DNA, 59 bp, synthetic construct
  misc_feature 1..59: note = Description of sequence: Primer
  source 1..59: mol_type = other DNA
atggacgacgacgacaagagaatgctgctggtttaaaaaaaaaaaaaaaaaaaaaaaaa

SEQ ID NO: 1280 - DNA, 59 bp, synthetic construct
  misc_feature 1..59: note = Description of sequence: Primer
  source 1..59: mol_type = other DNA
atggacgacgacgacaagtgcatcacgttagacgaaaaaaaaaaaaaaaaaaaaaaaaa

SEQ ID NO: 1281 - DNA, 59 bp, synthetic construct
  misc_feature 1..59: note = Description of sequence: Primer
  source 1..59: mol_type = other DNA
atggacgacgacgacaagtcgttgccatgaactcaaaaaaaaaaaaaaaaaaaaaaaaa

SEQ ID NO: 1282 - DNA, 59 bp, synthetic construct
  misc_feature 1..59: note = Description of sequence: Primer
  source 1..59: mol_type = other DNA
atggacgacgacgacaagtgacgcttgccatctaaaaaaaaaaaaaaaaaaaaaaaaaa

SEQ ID NO: 1283 - DNA, 59 bp, synthetic construct
  misc_feature 1..59: note = Description of sequence: Primer
  source 1..59: mol_type = other DNA
atggacgacgacgacaagggcctgtaaggattacaaaaaaaaaaaaaaaaaaaaaaaaa

SEQ ID NO: 1284 - DNA, 59 bp, synthetic construct
  misc_feature 1..59: note = Description of sequence: Primer
  source 1..59: mol_type = other DNA
atggacgacgacgacaaggccgattcgattcactaaaaaaaaaaaaaaaaaaaaaaaaa

SEQ ID NO: 1285 - DNA, 59 bp, synthetic construct
  misc_feature 1..59: note = Description of sequence: Primer
  source 1..59: mol_type = other DNA
atggacgacgacgacaagggagaaccagaacgacaaaaaaaaaaaaaaaaaaaaaaaaa

SEQ ID NO: 1286 - DNA, 59 bp, synthetic construct
  misc_feature 1..59: note = Description of sequence: Primer
  source 1..59: mol_type = other DNA
atggacgacgacgacaagaacgccttttacgtgtaaaaaaaaaaaaaaaaaaaaaaaaa

SEQ ID NO: 1287 - DNA, 59 bp, synthetic construct
  misc_feature 1..59: note = Description of sequence: Primer
  source 1..59: mol_type = other DNA
atggacgacgacgacaagaagtcccctctactgcaaaaaaaaaaaaaaaaaaaaaaaaa

SEQ ID NO: 1288 - DNA, 59 bp, synthetic construct
  misc_feature 1..59: note = Description of sequence: Primer
  source 1..59: mol_type = other DNA
atggacgacgacgacaagacattcaggtccctccaaaaaaaaaaaaaaaaaaaaaaaaa

SEQ ID NO: 1289 - DNA, 59 bp, synthetic construct
  misc_feature 1..59: note = Description of sequence: Primer
  source 1..59: mol_type = other DNA
atggacgacgacgacaagtaggggatggttctggaaaaaaaaaaaaaaaaaaaaaaaaa

SEQ ID NO: 1290 - DNA, 59 bp, synthetic construct
  misc_feature 1..59: note = Description of sequence: Primer
  source 1..59: mol_type = other DNA
atggacgacgacgacaagcaagtggatggagaggaaaaaaaaaaaaaaaaaaaaaaaaa

SEQ ID NO: 1291 - DNA, 59 bp, synthetic construct
  misc_feature 1..59: note = Description of sequence: Primer
  source 1..59: mol_type = other DNA
atggacgacgacgacaaggctctctacaaaggggaaaaaaaaaaaaaaaaaaaaaaaaa

SEQ ID NO: 1292 - DNA, 59 bp, synthetic construct
  misc_feature 1..59: note = Description of sequence: Primer
  source 1..59: mol_type = other DNA
atggacgacgacgacaaggtacaatagacgagtcaaaaaaaaaaaaaaaaaaaaaaaaa

SEQ ID NO: 1293 - DNA, 59 bp, synthetic construct
  misc_feature 1..59: note = Description of sequence: Primer
  source 1..59: mol_type = other DNA
atggacgacgacgacaagctaaagtcatcctgccaaaaaaaaaaaaaaaaaaaaaaaaa

SEQ ID NO: 1294 - DNA, 59 bp, synthetic construct
  misc_feature 1..59: note = Description of sequence: Primer
  source 1..59: mol_type = other DNA
atggacgacgacgacaagcctattgtactcctcgaaaaaaaaaaaaaaaaaaaaaaaaa

SEQ ID NO: 1295 - DNA, 59 bp, synthetic construct
  misc_feature 1..59: note = Description of sequence: Primer
  source 1..59: mol_type = other DNA
atggacgacgacgacaagtatgacgctgtaggcgaaaaaaaaaaaaaaaaaaaaaaaaa

SEQ ID NO: 1296 - DNA, 59 bp, synthetic construct
  misc_feature 1..59: note = Description of sequence: Primer
  source 1..59: mol_type = other DNA
atggacgacgacgacaaggctaggtctgactgtcaaaaaaaaaaaaaaaaaaaaaaaaa

SEQ ID NO: 1297 - DNA, 59 bp, synthetic construct
  misc_feature 1..59: note = Description of sequence: Primer
  source 1..59: mol_type = other DNA
atggacgacgacgacaagtccagagaatgtgagtaaaaaaaaaaaaaaaaaaaaaaaaa

SEQ ID NO: 1298 - DNA, 59 bp, synthetic construct
  misc_feature 1..59: note = Description of sequence: Primer
  source 1..59: mol_type = other DNA
atggacgacgacgacaagtgcttcagtcacagtaaaaaaaaaaaaaaaaaaaaaaaaaa

SEQ ID NO: 1299 - DNA, 59 bp, synthetic construct
  misc_feature 1..59: note = Description of sequence: Primer
  source 1..59: mol_type = other DNA
atggacgacgacgacaagttggtgactccgacctaaaaaaaaaaaaaaaaaaaaaaaaa

SEQ ID NO: 1300 - DNA, 59 bp, synthetic construct
  misc_feature 1..59: note = Description of sequence: Primer
  source 1..59: mol_type = other DNA
atggacgacgacgacaaggcttcccattcatactaaaaaaaaaaaaaaaaaaaaaaaaa

SEQ ID NO: 1301 - DNA, 59 bp, synthetic construct
  misc_feature 1..59: note = Description of sequence: Primer
  source 1..59: mol_type = other DNA
atggacgacgacgacaagtatgtcaactcgcgggaaaaaaaaaaaaaaaaaaaaaaaaa

SEQ ID NO: 1302 - DNA, 59 bp, synthetic construct
  misc_feature 1..59: note = Description of sequence: Primer
  source 1..59: mol_type = other DNA
atggacgacgacgacaagaccaacggcttcttgaaaaaaaaaaaaaaaaaaaaaaaaaa

SEQ ID NO: 1303 - DNA, 59 bp, synthetic construct
  misc_feature 1..59: note = Description of sequence: Primer
  source 1..59: mol_type = other DNA
atggacgacgacgacaaggtccacccaccatattaaaaaaaaaaaaaaaaaaaaaaaaa

SEQ ID NO: 1304 - DNA, 59 bp, synthetic construct
  misc_feature 1..59: note = Description of sequence: Primer
  source 1..59: mol_type = other DNA
atggacgacgacgacaagaaagatcccggctataaaaaaaaaaaaaaaaaaaaaaaaaa

SEQ ID NO: 1305 - DNA, 59 bp, synthetic construct
  misc_feature 1..59: note = Description of sequence: Primer
  source 1..59: mol_type = other DNA
atggacgacgacgacaaggggacatcgtttaacaaaaaaaaaaaaaaaaaaaaaaaaaa

SEQ ID NO: 1306 - DNA, 59 bp, synthetic construct
  misc_feature 1..59: note = Description of sequence: Primer
  source 1..59: mol_type = other DNA
atggacgacgacgacaagctcgtgcatccacgtaaaaaaaaaaaaaaaaaaaaaaaaaa

SEQ ID NO: 1307 - DNA, 59 bp, synthetic construct
  misc_feature 1..59: note = Description of sequence: Primer
  source 1..59: mol_type = other DNA
atggacgacgacgacaagaccggactctggtactaaaaaaaaaaaaaaaaaaaaaaaaa

SEQ ID NO: 1308 - DNA, 59 bp, synthetic construct
  misc_feature 1..59: note = Description of sequence: Primer
  source 1..59: mol_type = other DNA
atggacgacgacgacaagctgtagtgcgcagtataaaaaaaaaaaaaaaaaaaaaaaaa

SEQ ID NO: 1309 - DNA, 59 bp, synthetic construct
  misc_feature 1..59: note = Description of sequence: Primer
  source 1..59: mol_type = other DNA
atggacgacgacgacaagacacttcggtgacctgaaaaaaaaaaaaaaaaaaaaaaaaa

SEQ ID NO: 1310 - DNA, 59 bp, synthetic construct
  misc_feature 1..59: note = Description of sequence: Primer
  source 1..59: mol_type = other DNA
atggacgacgacgacaagtactgcttccgactgaaaaaaaaaaaaaaaaaaaaaaaaaa

SEQ ID NO: 1311 - DNA, 59 bp, synthetic construct
  misc_feature 1..59: note = Description of sequence: Primer
  source 1..59: mol_type = other DNA
atggacgacgacgacaaggtttcagcccaaacttaaaaaaaaaaaaaaaaaaaaaaaaa

SEQ ID NO: 1312 - DNA, 59 bp, synthetic construct
  misc_feature 1..59: note = Description of sequence: Primer
  source 1..59: mol_type = other DNA
atggacgacgacgacaagcgtactgacctcgagtaaaaaaaaaaaaaaaaaaaaaaaaa

SEQ ID NO: 1313 - DNA, 59 bp, synthetic construct
  misc_feature 1..59: note = Description of sequence: Primer
  source 1..59: mol_type = other DNA
atggacgacgacgacaaggcgtcaaacttttgagaaaaaaaaaaaaaaaaaaaaaaaaa

SEQ ID NO: 1314 - DNA, 59 bp, synthetic construct
  misc_feature 1..59: note = Description of sequence: Primer
  source 1..59: mol_type = other DNA
atggacgacgacgacaagatccctttggatccctaaaaaaaaaaaaaaaaaaaaaaaaa

SEQ ID NO: 1315 - DNA, 59 bp, synthetic construct
  misc_feature 1..59: note = Description of sequence: Primer
  source 1..59: mol_type = other DNA
atggacgacgacgacaagcttcgttgttcatcgtaaaaaaaaaaaaaaaaaaaaaaaaa

SEQ ID NO: 1316 - DNA, 59 bp, synthetic construct
  misc_feature 1..59: note = Description of sequence: Primer
  source 1..59: mol_type = other DNA
atggacgacgacgacaagcgtctaggataccataaaaaaaaaaaaaaaaaaaaaaaaaa

SEQ ID NO: 1317 - DNA, 59 bp, synthetic construct
  misc_feature 1..59: note = Description of sequence: Primer
  source 1..59: mol_type = other DNA
atggacgacgacgacaagctaagccaaatctcgcaaaaaaaaaaaaaaaaaaaaaaaaa

SEQ ID NO: 1318 - DNA, 59 bp, synthetic construct
  misc_feature 1..59: note = Description of sequence: Primer
  source 1..59: mol_type = other DNA
atggacgacgacgacaagggacgtagagcactagaaaaaaaaaaaaaaaaaaaaaaaaa

SEQ ID NO: 1319 - DNA, 59 bp, synthetic construct
  misc_feature 1..59: note = Description of sequence: Primer
  source 1..59: mol_type = other DNA
atggacgacgacgacaagacccctgatagatcttaaaaaaaaaaaaaaaaaaaaaaaaa

SEQ ID NO: 1320 - DNA, 59 bp, synthetic construct
  misc_feature 1..59: note = Description of sequence: Primer
  source 1..59: mol_type = other DNA
atggacgacgacgacaagagcactgcggtttgttaaaaaaaaaaaaaaaaaaaaaaaaa

SEQ ID NO: 1321 - DNA, 59 bp, synthetic construct
  misc_feature 1..59: note = Description of sequence: Primer
  source 1..59: mol_type = other DNA
atggacgacgacgacaagcgctctatgtaggaataaaaaaaaaaaaaaaaaaaaaaaaa

SEQ ID NO: 1322 - DNA, 59 bp, synthetic construct
  misc_feature 1..59: note = Description of sequence: Primer
  source 1..59: mol_type = other DNA
atggacgacgacgacaagctttgataccatgggaaaaaaaaaaaaaaaaaaaaaaaaaa

SEQ ID NO: 1323 - DNA, 59 bp, synthetic construct
  misc_feature 1..59: note = Description of sequence: Primer
  source 1..59: mol_type = other DNA
atggacgacgacgacaagccaccaccatcttctgaaaaaaaaaaaaaaaaaaaaaaaaa

SEQ ID NO: 1324 - DNA, 59 bp, synthetic construct
  misc_feature 1..59: note = Description of sequence: Primer
  source 1..59: mol_type = other DNA
atggacgacgacgacaagcagtcgtattgggaccaaaaaaaaaaaaaaaaaaaaaaaaa

SEQ ID NO: 1325 - DNA, 59 bp, synthetic construct
  misc_feature 1..59: note = Description of sequence: Primer
  source 1..59: mol_type = other DNA
atggacgacgacgacaagggtgtacatctgttgtaaaaaaaaaaaaaaaaaaaaaaaaa

SEQ ID NO: 1326 - DNA, 59 bp, synthetic construct
  misc_feature 1..59: note = Description of sequence: Primer
  source 1..59: mol_type = other DNA
atggacgacgacgacaagcttgtggagagtcgataaaaaaaaaaaaaaaaaaaaaaaaa

SEQ ID NO: 1327 - DNA, 59 bp, synthetic construct
  misc_feature 1..59: note = Description of sequence: Primer
  source 1..59: mol_type = other DNA
atggacgacgacgacaagactttaagcccgcgttaaaaaaaaaaaaaaaaaaaaaaaaa

SEQ ID NO: 1328 - DNA, 59 bp, synthetic construct
  misc_feature 1..59: note = Description of sequence: Primer
  source 1..59: mol_type = other DNA
atggacgacgacgacaaggaaaacggtcttccgaaaaaaaaaaaaaaaaaaaaaaaaaa

SEQ ID NO: 1329 - DNA, 59 bp, synthetic construct
  misc_feature 1..59: note = Description of sequence: Primer
  source 1..59: mol_type = other DNA
atggacgacgacgacaagcctcactcgtgtttccaaaaaaaaaaaaaaaaaaaaaaaaa

SEQ ID NO: 1330 - DNA, 59 bp, synthetic construct
  misc_feature 1..59: note = Description of sequence: Primer
  source 1..59: mol_type = other DNA
atggacgacgacgacaaggttacatccggccagtaaaaaaaaaaaaaaaaaaaaaaaaa

SEQ ID NO: 1331 - DNA, 59 bp, synthetic construct
  misc_feature 1..59: note = Description of sequence: Primer
  source 1..59: mol_type = other DNA
atggacgacgacgacaagtccgagataatctaggaaaaaaaaaaaaaaaaaaaaaaaaa

SEQ ID NO: 1332 - DNA, 59 bp, synthetic construct
  misc_feature 1..59: note = Description of sequence: Primer
  source 1..59: mol_type = other DNA
atggacgacgacgacaaggcactatcacctcagaaaaaaaaaaaaaaaaaaaaaaaaaa

SEQ ID NO: 1333 - DNA, 59 bp, synthetic construct
  misc_feature 1..59: note = Description of sequence: Primer
  source 1..59: mol_type = other DNA
atggacgacgacgacaagtcaggaggtcgtacctaaaaaaaaaaaaaaaaaaaaaaaaa

SEQ ID NO: 1334 - DNA, 59 bp, synthetic construct
  misc_feature 1..59: note = Description of sequence: Primer
  source 1..59: mol_type = other DNA
atggacgacgacgacaagaattgtgctcatcgggaaaaaaaaaaaaaaaaaaaaaaaaa

SEQ ID NO: 1335 - DNA, 59 bp, synthetic construct
  misc_feature 1..59: note = Description of sequence: Primer
  source 1..59: mol_type = other DNA
atggacgacgacgacaagcggcccgattctaatcaaaaaaaaaaaaaaaaaaaaaaaaa

SEQ ID NO: 1336 - DNA, 59 bp, synthetic construct
  misc_feature 1..59: note = Description of sequence: Primer
  source 1..59: mol_type = other DNA
atggacgacgacgacaagtgtatggcagcaagacaaaaaaaaaaaaaaaaaaaaaaaaa

SEQ ID NO: 1337 - DNA, 59 bp, synthetic construct
  misc_feature 1..59: note = Description of sequence: Primer
  source 1..59: mol_type = other DNA
atggacgacgacgacaagcaaagaccgacgaattaaaaaaaaaaaaaaaaaaaaaaaaa

SEQ ID NO: 1338 - DNA, 59 bp, synthetic construct
  misc_feature 1..59: note = Description of sequence: Primer
  source 1..59: mol_type = other DNA
atggacgacgacgacaaggtgcctctgttcatggaaaaaaaaaaaaaaaaaaaaaaaaa

SEQ ID NO: 1339 - DNA, 59 bp, synthetic construct
  misc_feature 1..59: note = Description of sequence: Primer
  source 1..59: mol_type = other DNA
atggacgacgacgacaaggaacgaagtggtagtcaaaaaaaaaaaaaaaaaaaaaaaaa

SEQ ID NO: 1340 - DNA, 59 bp, synthetic construct
  misc_feature 1..59: note = Description of sequence: Primer
  source 1..59: mol_type = other DNA
atggacgacgacgacaaggtctcgactagatttgaaaaaaaaaaaaaaaaaaaaaaaaa

SEQ ID NO: 1341 - DNA, 59 bp, synthetic construct
  misc_feature 1..59: note = Description of sequence: Primer
  source 1..59: mol_type = other DNA
atggacgacgacgacaagcactcccgaatggtgtaaaaaaaaaaaaaaaaaaaaaaaaa

SEQ ID NO: 1342 - DNA, 59 bp, synthetic construct
  misc_feature 1..59: note = Description of sequence: Primer
  source 1..59: mol_type = other DNA
atggacgacgacgacaagaagaaagataaccgcgaaaaaaaaaaaaaaaaaaaaaaaaa

SEQ ID NO: 1343 - DNA, 59 bp, synthetic construct
  misc_feature 1..59: note = Description of sequence: Primer
  source 1..59: mol_type = other DNA
atggacgacgacgacaagaaccagagggagggataaaaaaaaaaaaaaaaaaaaaaaaa

SEQ ID NO: 1344 - DNA, 59 bp, synthetic construct
  misc_feature 1..59: note = Description of sequence: Primer
  source 1..59: mol_type = other DNA
atggacgacgacgacaaggctgtcgctacgaattaaaaaaaaaaaaaaaaaaaaaaaaa

SEQ ID NO: 1345 - DNA, 59 bp, synthetic construct
  misc_feature 1..59: note = Description of sequence: Primer
  source 1..59: mol_type = other DNA
atggacgacgacgacaagtctcccactggtgactaaaaaaaaaaaaaaaaaaaaaaaaa

SEQ ID NO: 1346 - DNA, 59 bp, synthetic construct
  misc_feature 1..59: note = Description of sequence: Primer
  source 1..59: mol_type = other DNA
atggacgacgacgacaagcagactaggaggagagaaaaaaaaaaaaaaaaaaaaaaaaa

SEQ ID NO: 1347 - DNA, 59 bp, synthetic construct
  misc_feature 1..59: note = Description of sequence: Primer
  source 1..59: mol_type = other DNA
atggacgacgacgacaaggcagacaggacatcagaaaaaaaaaaaaaaaaaaaaaaaaa

SEQ ID NO: 1348 - DNA, 59 bp, synthetic construct
  misc_feature 1..59: note = Description of sequence: Primer
  source 1..59: mol_type = other DNA
atggacgacgacgacaagtccatggaagtgtaccaaaaaaaaaaaaaaaaaaaaaaaaa

SEQ ID NO: 1349 - DNA, 59 bp, synthetic construct
  misc_feature 1..59: note = Description of sequence: Primer
  source 1..59: mol_type = other DNA
atggacgacgacgacaaggtcattgactgtagtcaaaaaaaaaaaaaaaaaaaaaaaaa

SEQ ID NO: 1350 - DNA, 59 bp, synthetic construct
  misc_feature 1..59: note = Description of sequence: Primer
  source 1..59: mol_type = other DNA
atggacgacgacgacaagctcggaccttttctcgaaaaaaaaaaaaaaaaaaaaaaaaa

SEQ ID NO: 1351 - DNA, 59 bp, synthetic construct
  misc_feature 1..59: note = Description of sequence: Primer
  source 1..59: mol_type = other DNA
atggacgacgacgacaagtgctgatggtaaaccgaaaaaaaaaaaaaaaaaaaaaaaaa

SEQ ID NO: 1352 - DNA, 59 bp, synthetic construct
  misc_feature 1..59: note = Description of sequence: Primer
  source 1..59: mol_type = other DNA
atggacgacgacgacaagggctttcggtggtacaaaaaaaaaaaaaaaaaaaaaaaaaa

SEQ ID NO: 1353 - DNA, 59 bp, synthetic construct
  misc_feature 1..59: note = Description of sequence: Primer
  source 1..59: mol_type = other DNA
atggacgacgacgacaagcacatccaaccagcacaaaaaaaaaaaaaaaaaaaaaaaaa

SEQ ID NO: 1354 - DNA, 59 bp, synthetic construct
  misc_feature 1..59: note = Description of sequence: Primer
  source 1..59: mol_type = other DNA
atggacgacgacgacaagaccatcccgaaacgagaaaaaaaaaaaaaaaaaaaaaaaaa

SEQ ID NO: 1355 - DNA, 59 bp, synthetic construct
  misc_feature 1..59: note = Description of sequence: Primer
  source 1..59: mol_type = other DNA
atggacgacgacgacaaggagctacctcacattaaaaaaaaaaaaaaaaaaaaaaaaaa

SEQ ID NO: 1356 - DNA, 59 bp, synthetic construct
  misc_feature 1..59: note = Description of sequence: Primer
  source 1..59: mol_type = other DNA
atggacgacgacgacaaggatagtaccatgcgttaaaaaaaaaaaaaaaaaaaaaaaaa

SEQ ID NO: 1357 - DNA, 59 bp, synthetic construct
  misc_feature 1..59: note = Description of sequence: Primer
  source 1..59: mol_type = other DNA
atggacgacgacgacaaggacataggaggtcatgaaaaaaaaaaaaaaaaaaaaaaaaa

SEQ ID NO: 1358 - DNA, 59 bp, synthetic construct
  misc_feature 1..59: note = Description of sequence: Primer
  source 1..59: mol_type = other DNA
atggacgacgacgacaagtgtcgtatcactatccaaaaaaaaaaaaaaaaaaaaaaaaa

SEQ ID NO: 1359 - DNA, 59 bp, synthetic construct
  misc_feature 1..59: note = Description of sequence: Primer
  source 1..59: mol_type = other DNA
atggacgacgacgacaagctgcaagtgggcgaataaaaaaaaaaaaaaaaaaaaaaaaa

SEQ ID NO: 1360 - DNA, 59 bp, synthetic construct
  misc_feature 1..59: note = Description of sequence: Primer
  source 1..59: mol_type = other DNA
atggacgacgacgacaagagatccgataacgtacaaaaaaaaaaaaaaaaaaaaaaaaa

SEQ ID NO: 1361 - DNA, 59 bp, synthetic construct
  misc_feature 1..59: note = Description of sequence: Primer
  source 1..59: mol_type = other DNA
atggacgacgacgacaagattgtaggtgcccaccaaaaaaaaaaaaaaaaaaaaaaaaa

SEQ ID NO: 1362 - DNA, 59 bp, synthetic construct
  misc_feature 1..59: note = Description of sequence: Primer
  source 1..59: mol_type = other DNA
atggacgacgacgacaagaaagtaacaacgggagaaaaaaaaaaaaaaaaaaaaaaaaa

SEQ ID NO: 1363 - DNA, 59 bp, synthetic construct
  misc_feature 1..59: note = Description of sequence: Primer
  source 1..59: mol_type = other DNA
atggacgacgacgacaagtttccaatttgcgctcaaaaaaaaaaaaaaaaaaaaaaaaa

SEQ ID NO: 1364 - DNA, 59 bp, synthetic construct
  misc_feature 1..59: note = Description of sequence: Primer
  source 1..59: mol_type = other DNA
atggacgacgacgacaagttgcagctctctcgagaaaaaaaaaaaaaaaaaaaaaaaaa

SEQ ID NO: 1365 - DNA, 59 bp, synthetic construct
  misc_feature 1..59: note = Description of sequence: Primer
  source 1..59: mol_type = other DNA
atggacgacgacgacaagaccatccttgcatttcaaaaaaaaaaaaaaaaaaaaaaaaa

SEQ ID NO: 1366 - DNA, 59 bp, synthetic construct
  misc_feature 1..59: note = Description of sequence: Primer
  source 1..59: mol_type = other DNA
atggacgacgacgacaagtcctcggtttgtccagaaaaaaaaaaaaaaaaaaaaaaaaa

SEQ ID NO: 1367 - DNA, 59 bp, synthetic construct
  misc_feature 1..59: note = Description of sequence: Primer
  source 1..59: mol_type = other DNA
atggacgacgacgacaagtactcatccgtgaactaaaaaaaaaaaaaaaaaaaaaaaaa

SEQ ID NO: 1368 - DNA, 59 bp, synthetic construct
  misc_feature 1..59: note = Description of sequence: Primer
  source 1..59: mol_type = other DNA
atggacgacgacgacaagtgttacctagtccctgaaaaaaaaaaaaaaaaaaaaaaaaa

SEQ ID NO: 1369 - DNA, 59 bp, synthetic construct
  misc_feature 1..59: note = Description of sequence: Primer
  source 1..59: mol_type = other DNA
atggacgacgacgacaagacctataacgtgggcgaaaaaaaaaaaaaaaaaaaaaaaaa

SEQ ID NO: 1370 - DNA, 59 bp, synthetic construct
  misc_feature 1..59: note = Description of sequence: Primer
  source 1..59: mol_type = other DNA
atggacgacgacgacaagcaaggttgctgtgtgcaaaaaaaaaaaaaaaaaaaaaaaaa

SEQ ID NO: 1371 - DNA, 59 bp, synthetic construct
  misc_feature 1..59: note = Description of sequence: Primer
  source 1..59: mol_type = other DNA
atggacgacgacgacaagacgcagttgcacacttaaaaaaaaaaaaaaaaaaaaaaaaa

SEQ ID NO: 1372 - DNA, 59 bp, synthetic construct
  misc_feature 1..59: note = Description of sequence: Primer
  source 1..59: mol_type = other DNA
atggacgacgacgacaagaagggtcaggtgaggaaaaaaaaaaaaaaaaaaaaaaaaaa

SEQ ID NO: 1373 - DNA, 59 bp, synthetic construct
  misc_feature 1..59: note = Description of sequence: Primer
  source 1..59: mol_type = other DNA
atggacgacgacgacaagtgttgaggctgcaggaaaaaaaaaaaaaaaaaaaaaaaaaa

SEQ ID NO: 1374 - DNA, 59 bp, synthetic construct
  misc_feature 1..59: note = Description of sequence: Primer
  source 1..59: mol_type = other DNA
atggacgacgacgacaaggtccgagtgtattctgaaaaaaaaaaaaaaaaaaaaaaaaa

SEQ ID NO: 1375 - DNA, 59 bp, synthetic construct
  misc_feature 1..59: note = Description of sequence: Primer
  source 1..59: mol_type = other DNA
atggacgacgacgacaagtcaagaacctagcgagaaaaaaaaaaaaaaaaaaaaaaaaa

SEQ ID NO: 1376 - DNA, 59 bp, synthetic construct
  misc_feature 1..59: note = Description of sequence: Primer
  source 1..59: mol_type = other DNA
atggacgacgacgacaagtcttatatgaggcgtgaaaaaaaaaaaaaaaaaaaaaaaaa

SEQ ID NO: 1377 - DNA, 59 bp, synthetic construct
  misc_feature 1..59: note = Description of sequence: Primer
  source 1..59: mol_type = other DNA
atggacgacgacgacaagttatgtcgcgttccgtaaaaaaaaaaaaaaaaaaaaaaaaa

SEQ ID NO: 1378 - DNA, 59 bp, synthetic construct
  misc_feature 1..59: note = Description of sequence: Primer
  source 1..59: mol_type = other DNA
atggacgacgacgacaagcattgctcagccacacaaaaaaaaaaaaaaaaaaaaaaaaa

SEQ ID NO: 1379 - DNA, 59 bp, synthetic construct
  misc_feature 1..59: note = Description of sequence: Primer
  source 1..59: mol_type = other DNA
atggacgacgacgacaagtttatgcacacttgccaaaaaaaaaaaaaaaaaaaaaaaaa

SEQ ID NO: 1380 - DNA, 59 bp, synthetic construct
  misc_feature 1..59: note = Description of sequence: Primer
  source 1..59: mol_type = other DNA
atggacgacgacgacaagagttatcgggcacgataaaaaaaaaaaaaaaaaaaaaaaaa

SEQ ID NO: 1381 - DNA, 59 bp, synthetic construct
  misc_feature 1..59: note = Description of sequence: Primer
  source 1..59: mol_type = other DNA
atggacgacgacgacaagttggcatcccgattctaaaaaaaaaaaaaaaaaaaaaaaaa

SEQ ID NO: 1382 - DNA, 59 bp, synthetic construct
  misc_feature 1..59: note = Description of sequence: Primer
  source 1..59: mol_type = other DNA
atggacgacgacgacaagaatgtacgaagtccctaaaaaaaaaaaaaaaaaaaaaaaaa

SEQ ID NO: 1383 - DNA, 59 bp, synthetic construct
  misc_feature 1..59: note = Description of sequence: Primer
  source 1..59: mol_type = other DNA
atggacgacgacgacaaggatgaatggccttcttaaaaaaaaaaaaaaaaaaaaaaaaa

SEQ ID NO: 1384 - DNA, 59 bp, synthetic construct
  misc_feature 1..59: note = Description of sequence: Primer
  source 1..59: mol_type = other DNA
atggacgacgacgacaagaaacgtcaacctcgccaaaaaaaaaaaaaaaaaaaaaaaaa

SEQ ID NO: 1385 - DNA, 59 bp, synthetic construct
  misc_feature 1..59: note = Description of sequence: Primer
  source 1..59: mol_type = other DNA
atggacgacgacgacaagcacgttcgccagaaataaaaaaaaaaaaaaaaaaaaaaaaa

SEQ ID NO: 1386 - DNA, 59 bp, synthetic construct
  misc_feature 1..59: note = Description of sequence: Primer
  source 1..59: mol_type = other DNA
atggacgacgacgacaagcagatctaaatgcacgaaaaaaaaaaaaaaaaaaaaaaaaa

SEQ ID NO: 1387 - DNA, 59 bp, synthetic construct
  misc_feature 1..59: note = Description of sequence: Primer
  source 1..59: mol_type = other DNA
atggacgacgacgacaagattctcgcaactgtctaaaaaaaaaaaaaaaaaaaaaaaaa

SEQ ID NO: 1388 - DNA, 59 bp, synthetic construct
  misc_feature 1..59: note = Description of sequence: Primer
  source 1..59: mol_type = other DNA
atggacgacgacgacaagagcatggttcccaactaaaaaaaaaaaaaaaaaaaaaaaaa

SEQ ID NO: 1389 - DNA, 59 bp, synthetic construct
  misc_feature 1..59: note = Description of sequence: Primer
  source 1..59: mol_type = other DNA
atggacgacgacgacaagagggaatgcttgatctaaaaaaaaaaaaaaaaaaaaaaaaa

SEQ ID NO: 1390 - DNA, 59 bp, synthetic construct
  misc_feature 1..59: note = Description of sequence: Primer
  source 1..59: mol_type = other DNA
atggacgacgacgacaagccccacagtattcagcaaaaaaaaaaaaaaaaaaaaaaaaa

SEQ ID NO: 1391 - DNA, 59 bp, synthetic construct
  misc_feature 1..59: note = Description of sequence: Primer
  source 1..59: mol_type = other DNA
atggacgacgacgacaagagcgtactggacaagcaaaaaaaaaaaaaaaaaaaaaaaaa

SEQ ID NO: 1392 - DNA, 59 bp, synthetic construct
  misc_feature 1..59: note = Description of sequence: Primer
  source 1..59: mol_type = other DNA
atggacgacgacgacaagcggttcatcgttgaccaaaaaaaaaaaaaaaaaaaaaaaaa

SEQ ID NO: 1393 - DNA, 59 bp, synthetic construct
  misc_feature 1..59: note = Description of sequence: Primer
  source 1..59: mol_type = other DNA
atggacgacgacgacaaggggtgtactaggtaataaaaaaaaaaaaaaaaaaaaaaaaa

SEQ ID NO: 1394 - DNA, 59 bp, synthetic construct
  misc_feature 1..59: note = Description of sequence: Primer
  source 1..59: mol_type = other DNA
atggacgacgacgacaagccatctggattagactaaaaaaaaaaaaaaaaaaaaaaaaa

SEQ ID NO: 1395 - DNA, 59 bp, synthetic construct
  misc_feature 1..59: note = Description of sequence: Primer
  source 1..59: mol_type = other DNA
atggacgacgacgacaaggatgcgaagcgcatacaaaaaaaaaaaaaaaaaaaaaaaaa

SEQ ID NO: 1396 - DNA, 59 bp, synthetic construct
  misc_feature 1..59: note = Description of sequence: Primer
  source 1..59: mol_type = other DNA
atggacgacgacgacaagcataccacgcctatgtaaaaaaaaaaaaaaaaaaaaaaaaa

SEQ ID NO: 1397 - DNA, 59 bp, synthetic construct
  misc_feature 1..59: note = Description of sequence: Primer
  source 1..59: mol_type = other DNA
atggacgacgacgacaaggaagtggtcttcaggtaaaaaaaaaaaaaaaaaaaaaaaaa

SEQ ID NO: 1398 - DNA, 59 bp, synthetic construct
  misc_feature 1..59: note = Description of sequence: Primer
  source 1..59: mol_type = other DNA
atggacgacgacgacaagtcgctgagccgcaaataaaaaaaaaaaaaaaaaaaaaaaaa

SEQ ID NO: 1399 - DNA, 59 bp, synthetic construct
  misc_feature 1..59: note = Description of sequence: Primer
  source 1..59: mol_type = other DNA
atggacgacgacgacaagttatggagcctgttcgaaaaaaaaaaaaaaaaaaaaaaaaa

SEQ ID NO: 1400 - DNA, 59 bp, synthetic construct
  misc_feature 1..59: note = Description of sequence: Primer
  source 1..59: mol_type = other DNA
atggacgacgacgacaaggaagcccataggaggtaaaaaaaaaaaaaaaaaaaaaaaaa

SEQ ID NO: 1401 - DNA, 59 bp, synthetic construct
  misc_feature 1..59: note = Description of sequence: Primer
  source 1..59: mol_type = other DNA
atggacgacgacgacaaggccgtgacagtggtttaaaaaaaaaaaaaaaaaaaaaaaaa

SEQ ID NO: 1402 - DNA, 59 bp, synthetic construct
  misc_feature 1..59: note = Description of sequence: Primer
  source 1..59: mol_type = other DNA
atggacgacgacgacaagaagtcgacctctatcgaaaaaaaaaaaaaaaaaaaaaaaaa

SEQ ID NO: 1403 - DNA, 59 bp, synthetic construct
  misc_feature 1..59: note = Description of sequence: Primer
  source 1..59: mol_type = other DNA
atggacgacgacgacaagcattgactttcgagcgaaaaaaaaaaaaaaaaaaaaaaaaa

SEQ ID NO: 1404 - DNA, 59 bp, synthetic construct
  misc_feature 1..59: note = Description of sequence: Primer
  source 1..59: mol_type = other DNA
atggacgacgacgacaagattaaacagggagctgaaaaaaaaaaaaaaaaaaaaaaaaa

SEQ ID NO: 1405 - DNA, 59 bp, synthetic construct
  misc_feature 1..59: note = Description of sequence: Primer
  source 1..59: mol_type = other DNA
atggacgacgacgacaagacaatccgaggtctgaaaaaaaaaaaaaaaaaaaaaaaaaa

SEQ ID NO: 1406 - DNA, 59 bp, synthetic construct
  misc_feature 1..59: note = Description of sequence: Primer
  source 1..59: mol_type = other DNA
atggacgacgacgacaaggaagggcaaggtttctaaaaaaaaaaaaaaaaaaaaaaaaa

SEQ ID NO: 1407 - DNA, 59 bp, synthetic construct
  misc_feature 1..59: note = Description of sequence: Primer
  source 1..59: mol_type = other DNA
atggacgacgacgacaaggtggaaaaccgagataaaaaaaaaaaaaaaaaaaaaaaaaa

SEQ ID NO: 1408 - DNA, 59 bp, synthetic construct
  misc_feature 1..59: note = Description of sequence: Primer
  source 1..59: mol_type = other DNA
atggacgacgacgacaagaccattactcgtaagcaaaaaaaaaaaaaaaaaaaaaaaaa

SEQ ID NO: 1409 - DNA, 59 bp, synthetic construct
  misc_feature 1..59: note = Description of sequence: Primer
  source 1..59: mol_type = other DNA
atggacgacgacgacaagcgtccgatgacctcttaaaaaaaaaaaaaaaaaaaaaaaaa

SEQ ID NO: 1410 - DNA, 59 bp, synthetic construct
  misc_feature 1..59: note = Description of sequence: Primer
  source 1..59: mol_type = other DNA
atggacgacgacgacaagtgtggcgcttacaaacaaaaaaaaaaaaaaaaaaaaaaaaa

SEQ ID NO: 1411 - DNA, 59 bp, synthetic construct
  misc_feature 1..59: note = Description of sequence: Primer
  source 1..59: mol_type = other DNA
atggacgacgacgacaagattcacatgtgcaggaaaaaaaaaaaaaaaaaaaaaaaaaa

SEQ ID NO: 1412 - DNA, 59 bp, synthetic construct
  misc_feature 1..59: note = Description of sequence: Primer
  source 1..59: mol_type = other DNA
atggacgacgacgacaagctaccacacaagctccaaaaaaaaaaaaaaaaaaaaaaaaa

SEQ ID NO: 1413 - DNA, 59 bp, synthetic construct
  misc_feature 1..59: note = Description of sequence: Primer
  source 1..59: mol_type = other DNA
atggacgacgacgacaagggatggtaattcgcttaaaaaaaaaaaaaaaaaaaaaaaaa

SEQ ID NO: 1414 - DNA, 59 bp, synthetic construct
  misc_feature 1..59: note = Description of sequence: Primer
  source 1..59: mol_type = other DNA
atggacgacgacgacaagttcaaaggtttgacgcaaaaaaaaaaaaaaaaaaaaaaaaa

SEQ ID NO: 1415 - DNA, 59 bp, synthetic construct
  misc_feature 1..59: note = Description of sequence: Primer
  source 1..59: mol_type = other DNA
atggacgacgacgacaaggtctgcagcaatctctaaaaaaaaaaaaaaaaaaaaaaaaa

SEQ ID NO: 1416 - DNA, 59 bp, synthetic construct
  misc_feature 1..59: note = Description of sequence: Primer
  source 1..59: mol_type = other DNA
atggacgacgacgacaaggacagtcgtaactgggaaaaaaaaaaaaaaaaaaaaaaaaa

SEQ ID NO: 1417 - DNA, 59 bp, synthetic construct
  misc_feature 1..59: note = Description of sequence: Primer
  source 1..59: mol_type = other DNA
atggacgacgacgacaagagtgcttgtaaagagcaaaaaaaaaaaaaaaaaaaaaaaaa

SEQ ID NO: 1418 - DNA, 59 bp, synthetic construct
  misc_feature 1..59: note = Description of sequence: Primer
  source 1..59: mol_type = other DNA
atggacgacgacgacaaggtaggagctgcctttgaaaaaaaaaaaaaaaaaaaaaaaaa

SEQ ID NO: 1419 - DNA, 59 bp, synthetic construct
  misc_feature 1..59: note = Description of sequence: Primer
  source 1..59: mol_type = other DNA
atggacgacgacgacaagccactttcgtagacataaaaaaaaaaaaaaaaaaaaaaaaa

SEQ ID NO: 1420 - DNA, 59 bp, synthetic construct
  misc_feature 1..59: note = Description of sequence: Primer
  source 1..59: mol_type = other DNA
atggacgacgacgacaagtgattagcgtggttacaaaaaaaaaaaaaaaaaaaaaaaaa

SEQ ID NO: 1421 - DNA, 59 bp, synthetic construct
  misc_feature 1..59: note = Description of sequence: Primer
  source 1..59: mol_type = other DNA
atggacgacgacgacaagaaaggcagtaagaaccaaaaaaaaaaaaaaaaaaaaaaaaa

SEQ ID NO: 1422 - DNA, 59 bp, synthetic construct
  misc_feature 1..59: note = Description of sequence: Primer
  source 1..59: mol_type = other DNA
atggacgacgacgacaagcgtagtttagggcccaaaaaaaaaaaaaaaaaaaaaaaaaa

SEQ ID NO: 1423 - DNA, 59 bp, synthetic construct
  misc_feature 1..59: note = Description of sequence: Primer
  source 1..59: mol_type = other DNA
atggacgacgacgacaaggtcataatcccgttccaaaaaaaaaaaaaaaaaaaaaaaaa

SEQ ID NO: 1424 - DNA, 59 bp, synthetic construct
  misc_feature 1..59: note = Description of sequence: Primer
  source 1..59: mol_type = other DNA
atggacgacgacgacaagttgatacgttccctggaaaaaaaaaaaaaaaaaaaaaaaaa

SEQ ID NO: 1425 - DNA, 59 bp, synthetic construct
  misc_feature 1..59: note = Description of sequence: Primer
  source 1..59: mol_type = other DNA
atggacgacgacgacaagaacgataggatcgcgaaaaaaaaaaaaaaaaaaaaaaaaaa

SEQ ID NO: 1426 - DNA, 59 bp, synthetic construct
  misc_feature 1..59: note = Description of sequence: Primer
  source 1..59: mol_type = other DNA
atggacgacgacgacaagagaatttagggcgcctaaaaaaaaaaaaaaaaaaaaaaaaa

SEQ ID NO: 1427 - DNA, 59 bp, synthetic construct
  misc_feature 1..59: note = Description of sequence: Primer
  source 1..59: mol_type = other DNA
atggacgacgacgacaagctagcatttagacccaaaaaaaaaaaaaaaaaaaaaaaaaa

SEQ ID NO: 1428 - DNA, 59 bp, synthetic construct
  misc_feature 1..59: note = Description of sequence: Primer
  source 1..59: mol_type = other DNA
atggacgacgacgacaagaccgtttgacggtttgaaaaaaaaaaaaaaaaaaaaaaaaa

SEQ ID NO: 1429 - DNA, 59 bp, synthetic construct
  misc_feature 1..59: note = Description of sequence: Primer
  source 1..59: mol_type = other DNA
atggacgacgacgacaaggtggtagcatgctagcaaaaaaaaaaaaaaaaaaaaaaaaa

SEQ ID NO: 1430 - DNA, 59 bp, synthetic construct
  misc_feature 1..59: note = Description of sequence: Primer
  source 1..59: mol_type = other DNA
atggacgacgacgacaagctgtttcgtaccagtcaaaaaaaaaaaaaaaaaaaaaaaaa

SEQ ID NO: 1431 - DNA, 59 bp, synthetic construct
  misc_feature 1..59: note = Description of sequence: Primer
  source 1..59: mol_type = other DNA
atggacgacgacgacaagattacgtccgagagagaaaaaaaaaaaaaaaaaaaaaaaaa

SEQ ID NO: 1432 - DNA, 59 bp, synthetic construct
  misc_feature 1..59: note = Description of sequence: Primer
  source 1..59: mol_type = other DNA
atggacgacgacgacaagggacttattcgacactaaaaaaaaaaaaaaaaaaaaaaaaa

SEQ ID NO: 1433 - DNA, 59 bp, synthetic construct
  misc_feature 1..59: note = Description of sequence: Primer
  source 1..59: mol_type = other DNA
atggacgacgacgacaagccattgacaggacgagaaaaaaaaaaaaaaaaaaaaaaaaa

SEQ ID NO: 1434 - DNA, 59 bp, synthetic construct
  misc_feature 1..59: note = Description of sequence: Primer
  source 1..59: mol_type = other DNA
atggacgacgacgacaagagcgtgaaatcgtgctaaaaaaaaaaaaaaaaaaaaaaaaa

SEQ ID NO: 1435 - DNA, 59 bp, synthetic construct
  misc_feature 1..59: note = Description of sequence: Primer
  source 1..59: mol_type = other DNA
atggacgacgacgacaagctggttataaggggttaaaaaaaaaaaaaaaaaaaaaaaaa

SEQ ID NO: 1436 - DNA, 59 bp, synthetic construct
  misc_feature 1..59: note = Description of sequence: Primer
  source 1..59: mol_type = other DNA
atggacgacgacgacaagctgcgcatccgtactaaaaaaaaaaaaaaaaaaaaaaaaaa

SEQ ID NO: 1437 - DNA, 59 bp, synthetic construct
  misc_feature 1..59: note = Description of sequence: Primer
  source 1..59: mol_type = other DNA
atggacgacgacgacaagatcccacagcctaatgaaaaaaaaaaaaaaaaaaaaaaaaa

SEQ ID NO: 1438 - DNA, 59 bp, synthetic construct
  misc_feature 1..59: note = Description of sequence: Primer
  source 1..59: mol_type = other DNA
atggacgacgacgacaagatgcgtaatcaggaacaaaaaaaaaaaaaaaaaaaaaaaaa

SEQ ID NO: 1439 - DNA, 59 bp, synthetic construct
  misc_feature 1..59: note = Description of sequence: Primer
  source 1..59: mol_type = other DNA
atggacgacgacgacaagacgccgtgaactgaacaaaaaaaaaaaaaaaaaaaaaaaaa

SEQ ID NO: 1440 - DNA, 59 bp, synthetic construct
  misc_feature 1..59: note = Description of sequence: Primer
  source 1..59: mol_type = other DNA
atggacgacgacgacaagatagcccggcaatgcaaaaaaaaaaaaaaaaaaaaaaaaaa

SEQ ID NO: 1441 - DNA, 59 bp, synthetic construct
  misc_feature 1..59: note = Description of sequence: Primer
  source 1..59: mol_type = other DNA
atggacgacgacgacaagcacctcaaagtcagccaaaaaaaaaaaaaaaaaaaaaaaaa

SEQ ID NO: 1442 - DNA, 59 bp, synthetic construct
  misc_feature 1..59: note = Description of sequence: Primer
  source 1..59: mol_type = other DNA
atggacgacgacgacaagttccaaggacgtggaaaaaaaaaaaaaaaaaaaaaaaaaaa

SEQ ID NO: 1443 - DNA, 59 bp, synthetic construct
  misc_feature 1..59: note = Description of sequence: Primer
  source 1..59: mol_type = other DNA
atggacgacgacgacaagagagagatgctaaccgaaaaaaaaaaaaaaaaaaaaaaaaa

SEQ ID NO: 1444 - DNA, 59 bp, synthetic construct
  misc_feature 1..59: note = Description of sequence: Primer
  source 1..59: mol_type = other DNA
atggacgacgacgacaaggttccggaactgtcctaaaaaaaaaaaaaaaaaaaaaaaaa

SEQ ID NO: 1445 - DNA, 59 bp, synthetic construct
  misc_feature 1..59: note = Description of sequence: Primer
  source 1..59: mol_type = other DNA
atggacgacgacgacaagggatggtcctgaatccaaaaaaaaaaaaaaaaaaaaaaaaa

SEQ ID NO: 1446 - DNA, 59 bp, synthetic construct
  misc_feature 1..59: note = Description of sequence: Primer
  source 1..59: mol_type = other DNA
atggacgacgacgacaagattttggcggtgggtcaaaaaaaaaaaaaaaaaaaaaaaaa

SEQ ID NO: 1447 - DNA, 59 bp, synthetic construct
  misc_feature 1..59: note = Description of sequence: Primer
  source 1..59: mol_type = other DNA
atggacgacgacgacaagaatcgattgcgtacggaaaaaaaaaaaaaaaaaaaaaaaaa

SEQ ID NO: 1448 - DNA, 59 bp, synthetic construct
  misc_feature 1..59: note = Description of sequence: Primer
  source 1..59: mol_type = other DNA
atggacgacgacgacaagtggagccgttattacgaaaaaaaaaaaaaaaaaaaaaaaaa

SEQ ID NO: 1449 - DNA, 59 bp, synthetic construct
  misc_feature 1..59: note = Description of sequence: Primer
  source 1..59: mol_type = other DNA
atggacgacgacgacaagaggcattgtgactggtaaaaaaaaaaaaaaaaaaaaaaaaa

SEQ ID NO: 1450 - DNA, 59 bp, synthetic construct
  misc_feature 1..59: note = Description of sequence: Primer
  source 1..59: mol_type = other DNA
atggacgacgacgacaaggactgctgtccaaaataaaaaaaaaaaaaaaaaaaaaaaaa

SEQ ID NO: 1451 - DNA, 59 bp, synthetic construct
  misc_feature 1..59: note = Description of sequence: Primer
  source 1..59: mol_type = other DNA
atggacgacgacgacaagccctttgcgtcccattaaaaaaaaaaaaaaaaaaaaaaaaa

SEQ ID NO: 1452 - DNA, 59 bp, synthetic construct
  misc_feature 1..59: note = Description of sequence: Primer
  source 1..59: mol_type = other DNA
atggacgacgacgacaagttgcaagcggctaccaaaaaaaaaaaaaaaaaaaaaaaaaa

SEQ ID NO: 1453 - DNA, 59 bp, synthetic construct
  misc_feature 1..59: note = Description of sequence: Primer
  source 1..59: mol_type = other DNA
atggacgacgacgacaagttggcgcatttatcggaaaaaaaaaaaaaaaaaaaaaaaaa

SEQ ID NO: 1454 - DNA, 59 bp, synthetic construct
  misc_feature 1..59: note = Description of sequence: Primer
  source 1..59: mol_type = other DNA
atggacgacgacgacaagcaacatcttaggtctcaaaaaaaaaaaaaaaaaaaaaaaaa

SEQ ID NO: 1455 - DNA, 59 bp, synthetic construct
  misc_feature 1..59: note = Description of sequence: Primer
  source 1..59: mol_type = other DNA
atggacgacgacgacaaggtaatccgtcaggagtaaaaaaaaaaaaaaaaaaaaaaaaa

SEQ ID NO: 1456 - DNA, 59 bp, synthetic construct
  misc_feature 1..59: note = Description of sequence: Primer
  source 1..59: mol_type = other DNA
atggacgacgacgacaagcactgtcacgtacacaaaaaaaaaaaaaaaaaaaaaaaaaa

SEQ ID NO: 1457 - DNA, 59 bp, synthetic construct
  misc_feature 1..59: note = Description of sequence: Primer
  source 1..59: mol_type = other DNA
atggacgacgacgacaagggtgaggggatagtaaaaaaaaaaaaaaaaaaaaaaaaaaa

SEQ ID NO: 1458 - DNA, 59 bp, synthetic construct
  misc_feature 1..59: note = Description of sequence: Primer
  source 1..59: mol_type = other DNA
atggacgacgacgacaagatgggcacatattctcaaaaaaaaaaaaaaaaaaaaaaaaa

SEQ ID NO: 1459 - DNA, 59 bp, synthetic construct
  misc_feature 1..59: note = Description of sequence: Primer
  source 1..59: mol_type = other DNA
atggacgacgacgacaagaaaacgcctatcactcaaaaaaaaaaaaaaaaaaaaaaaaa

SEQ ID NO: 1460 - DNA, 59 bp, synthetic construct
  misc_feature 1..59: note = Description of sequence: Primer
  source 1..59: mol_type = other DNA
atggacgacgacgacaagctctctttgatccgtaaaaaaaaaaaaaaaaaaaaaaaaaa

SEQ ID NO: 1461 - DNA, 59 bp, synthetic construct
  misc_feature 1..59: note = Description of sequence: Primer
  source 1..59: mol_type = other DNA
atggacgacgacgacaagcttacgaggctaccgaaaaaaaaaaaaaaaaaaaaaaaaaa

SEQ ID NO: 1462 - DNA, 59 bp, synthetic construct
  misc_feature 1..59: note = Description of sequence: Primer
  source 1..59: mol_type = other DNA
atggacgacgacgacaagtgtctagctgaggcaaaaaaaaaaaaaaaaaaaaaaaaaaa

SEQ ID NO: 1463 - DNA, 59 bp, synthetic construct
  misc_feature 1..59: note = Description of sequence: Primer
  source 1..59: mol_type = other DNA
atggacgacgacgacaaggtaggacagatccgcaaaaaaaaaaaaaaaaaaaaaaaaaa

SEQ ID NO: 1464 - DNA, 59 bp, synthetic construct
  misc_feature 1..59: note = Description of sequence: Primer
  source 1..59: mol_type = other DNA
atggacgacgacgacaaggtacccatgtcttaacaaaaaaaaaaaaaaaaaaaaaaaaa

SEQ ID NO: 1465 - DNA, 59 bp, synthetic construct
  misc_feature 1..59: note = Description of sequence: Primer
  source 1..59: mol_type = other DNA
atggacgacgacgacaagagacctctcggtgaataaaaaaaaaaaaaaaaaaaaaaaaa

SEQ ID NO: 1466 - DNA, 59 bp, synthetic construct
  misc_feature 1..59: note = Description of sequence: Primer
  source 1..59: mol_type = other DNA
atggacgacgacgacaaggggtcgattcacttgaaaaaaaaaaaaaaaaaaaaaaaaaa

SEQ ID NO: 1467 - DNA, 59 bp, synthetic construct
  misc_feature 1..59: note = Description of sequence: Primer
  source 1..59: mol_type = other DNA
atggacgacgacgacaagtcgatacgccaaggtgaaaaaaaaaaaaaaaaaaaaaaaaa

SEQ ID NO: 1468 - DNA, 59 bp, synthetic construct
  misc_feature 1..59: note = Description of sequence: Primer
  source 1..59: mol_type = other DNA
atggacgacgacgacaagtgtttgtagccgcctgaaaaaaaaaaaaaaaaaaaaaaaaa

SEQ ID NO: 1469 - DNA, 59 bp, synthetic construct
  misc_feature 1..59: note = Description of sequence: Primer
  source 1..59: mol_type = other DNA
atggacgacgacgacaagaattctgcctcctcaaaaaaaaaaaaaaaaaaaaaaaaaaa

SEQ ID NO: 1470 - DNA, 59 bp, synthetic construct
  misc_feature 1..59: note = Description of sequence: Primer
  source 1..59: mol_type = other DNA
atggacgacgacgacaagctccgaaaagttgcagaaaaaaaaaaaaaaaaaaaaaaaaa

SEQ ID NO: 1471 - DNA, 59 bp, synthetic construct
  misc_feature 1..59: note = Description of sequence: Primer
  source 1..59: mol_type = other DNA
atggacgacgacgacaagaagccggtcatagcctaaaaaaaaaaaaaaaaaaaaaaaaa

SEQ ID NO: 1472 - DNA, 59 bp, synthetic construct
  misc_feature 1..59: note = Description of sequence: Primer
  source 1..59: mol_type = other DNA
atggacgacgacgacaagcatcagtaggtgacgcaaaaaaaaaaaaaaaaaaaaaaaaa

SEQ ID NO: 1473 - DNA, 59 bp, synthetic construct
  misc_feature 1..59: note = Description of sequence: Primer
  source 1..59: mol_type = other DNA
atggacgacgacgacaagaatcggcgcattgggaaaaaaaaaaaaaaaaaaaaaaaaaa

SEQ ID NO: 1474 - DNA, 59 bp, synthetic construct
  misc_feature 1..59: note = Description of sequence: Primer
  source 1..59: mol_type = other DNA
atggacgacgacgacaaggaaattgaggtcctgcaaaaaaaaaaaaaaaaaaaaaaaaa

SEQ ID NO: 1475 - DNA, 59 bp, synthetic construct
  misc_feature 1..59: note = Description of sequence: Primer
  source 1..59: mol_type = other DNA
atggacgacgacgacaagacctgcgtgactcttgaaaaaaaaaaaaaaaaaaaaaaaaa

SEQ ID NO: 1476 - DNA, 59 bp, synthetic construct
  misc_feature 1..59: note = Description of sequence: Primer
  source 1..59: mol_type = other DNA
atggacgacgacgacaaggcgcgggtaatcatacaaaaaaaaaaaaaaaaaaaaaaaaa

SEQ ID NO: 1477 - DNA, 59 bp, synthetic construct
  misc_feature 1..59: note = Description of sequence: Primer
  source 1..59: mol_type = other DNA
atggacgacgacgacaagtcttaggctttcgtgcaaaaaaaaaaaaaaaaaaaaaaaaa

SEQ ID NO: 1478 - DNA, 59 bp, synthetic construct
  misc_feature 1..59: note = Description of sequence: Primer
  source 1..59: mol_type = other DNA
atggacgacgacgacaagccgaagacactgtcgtaaaaaaaaaaaaaaaaaaaaaaaaa

SEQ ID NO: 1479 - DNA, 59 bp, synthetic construct
  misc_feature 1..59: note = Description of sequence: Primer
  source 1..59: mol_type = other DNA
atggacgacgacgacaagtcatttccccgcctctaaaaaaaaaaaaaaaaaaaaaaaaa

SEQ ID NO: 1480 - DNA, 59 bp, synthetic construct
  misc_feature 1..59: note = Description of sequence: Primer
  source 1..59: mol_type = other DNA
atggacgacgacgacaagccttgtgcgtatgtaaaaaaaaaaaaaaaaaaaaaaaaaaa

SEQ ID NO: 1481 - DNA, 59 bp, synthetic construct
  misc_feature 1..59: note = Description of sequence: Primer
  source 1..59: mol_type = other DNA
atggacgacgacgacaagtgcgttggtctaaaggaaaaaaaaaaaaaaaaaaaaaaaaa

SEQ ID NO: 1482 - DNA, 59 bp, synthetic construct
  misc_feature 1..59: note = Description of sequence: Primer
  source 1..59: mol_type = other DNA
atggacgacgacgacaagccctactaacaatgtcaaaaaaaaaaaaaaaaaaaaaaaaa

SEQ ID NO: 1483 - DNA, 59 bp, synthetic construct
  misc_feature 1..59: note = Description of sequence: Primer
  source 1..59: mol_type = other DNA
atggacgacgacgacaagtcctcttagcttgggcaaaaaaaaaaaaaaaaaaaaaaaaa

SEQ ID NO: 1484 - DNA, 59 bp, synthetic construct
  misc_feature 1..59: note = Description of sequence: Primer
  source 1..59: mol_type = other DNA
atggacgacgacgacaagctcttacccgcgataaaaaaaaaaaaaaaaaaaaaaaaaaa

SEQ ID NO: 1485 - DNA, 59 bp, synthetic construct
  misc_feature 1..59: note = Description of sequence: Primer
  source 1..59: mol_type = other DNA
atggacgacgacgacaagtctgttgggttgtccgaaaaaaaaaaaaaaaaaaaaaaaaa

SEQ ID NO: 1486 - DNA, 59 bp, synthetic construct
  misc_feature 1..59: note = Description of sequence: Primer
  source 1..59: mol_type = other DNA
atggacgacgacgacaagagaagtggtcttagacaaaaaaaaaaaaaaaaaaaaaaaaa

SEQ ID NO: 1487 - DNA, 59 bp, synthetic construct
  misc_feature 1..59: note = Description of sequence: Primer
  source 1..59: mol_type = other DNA
atggacgacgacgacaagtcagaacaagtcatgcaaaaaaaaaaaaaaaaaaaaaaaaa

SEQ ID NO: 1488 - DNA, 59 bp, synthetic construct
  misc_feature 1..59: note = Description of sequence: Primer
  source 1..59: mol_type = other DNA
atggacgacgacgacaagaatccatcggccagtaaaaaaaaaaaaaaaaaaaaaaaaaa

SEQ ID NO: 1489 - DNA, 59 bp, synthetic construct
  misc_feature 1..59: note = Description of sequence: Primer
  source 1..59: mol_type = other DNA
atggacgacgacgacaagtcatcagaagcggaagaaaaaaaaaaaaaaaaaaaaaaaaa

SEQ ID NO: 1490 - DNA, 59 bp, synthetic construct
  misc_feature 1..59: note = Description of sequence: Primer
  source 1..59: mol_type = other DNA
atggacgacgacgacaagcgttaggttggactacaaaaaaaaaaaaaaaaaaaaaaaaa

SEQ ID NO: 1491 - DNA, 59 bp, synthetic construct
  misc_feature 1..59: note = Description of sequence: Primer
  source 1..59: mol_type = other DNA
atggacgacgacgacaaggattagcatcccgaggaaaaaaaaaaaaaaaaaaaaaaaaa

SEQ ID NO: 1492 - DNA, 59 bp, synthetic construct
  misc_feature 1..59: note = Description of sequence: Primer
  source 1..59: mol_type = other DNA
atggacgacgacgacaagtacctgaatagtcacgaaaaaaaaaaaaaaaaaaaaaaaaa

SEQ ID NO: 1493 - DNA, 59 bp, synthetic construct
  misc_feature 1..59: note = Description of sequence: Primer
  source 1..59: mol_type = other DNA
atggacgacgacgacaagagaaccgcatgtcaccaaaaaaaaaaaaaaaaaaaaaaaaa

SEQ ID NO: 1494 - DNA, 59 bp, synthetic construct
  misc_feature 1..59: note = Description of sequence: Primer
  source 1..59: mol_type = other DNA
atggacgacgacgacaagcgattcatatggaccgaaaaaaaaaaaaaaaaaaaaaaaaa

SEQ ID NO: 1495 - DNA, 59 bp, synthetic construct
  misc_feature 1..59: note = Description of sequence: Primer
  source 1..59: mol_type = other DNA
atggacgacgacgacaaggaacgaggcctattgtaaaaaaaaaaaaaaaaaaaaaaaaa

SEQ ID NO: 1496 - DNA, 59 bp, synthetic construct
  misc_feature 1..59: note = Description of sequence: Primer
  source 1..59: mol_type = other DNA
atggacgacgacgacaagtgggagatatgtaaccaaaaaaaaaaaaaaaaaaaaaaaaa

SEQ ID NO: 1497 - DNA, 59 bp, synthetic construct
  misc_feature 1..59: note = Description of sequence: Primer
  source 1..59: mol_type = other DNA
atggacgacgacgacaagttctgaaaacgaagccaaaaaaaaaaaaaaaaaaaaaaaaa

SEQ ID NO: 1498 - DNA, 59 bp, synthetic construct
  misc_feature 1..59: note = Description of sequence: Primer
  source 1..59: mol_type = other DNA
atggacgacgacgacaagagtctctttatgacccaaaaaaaaaaaaaaaaaaaaaaaaa

SEQ ID NO: 1499 - DNA, 59 bp, synthetic construct
  misc_feature 1..59: note = Description of sequence: Primer
  source 1..59: mol_type = other DNA
atggacgacgacgacaaggagctagtaagacgccaaaaaaaaaaaaaaaaaaaaaaaaa

SEQ ID NO: 1500 - DNA, 59 bp, synthetic construct
  misc_feature 1..59: note = Description of sequence: Primer
  source 1..59: mol_type = other DNA
atggacgacgacgacaagaccggtccttcgactaaaaaaaaaaaaaaaaaaaaaaaaaa

SEQ ID NO: 1501 - DNA, 59 bp, synthetic construct
  misc_feature 1..59: note = Description of sequence: Primer
  source 1..59: mol_type = other DNA
atggacgacgacgacaagaaatgacgggcgtcacaaaaaaaaaaaaaaaaaaaaaaaaa

SEQ ID NO: 1502 - DNA, 59 bp, synthetic construct
  misc_feature 1..59: note = Description of sequence: Primer
  source 1..59: mol_type = other DNA
atggacgacgacgacaagtctcggacccaatcctaaaaaaaaaaaaaaaaaaaaaaaaa

SEQ ID NO: 1503 - DNA, 59 bp, synthetic construct
  misc_feature 1..59: note = Description of sequence: Primer
  source 1..59: mol_type = other DNA
atggacgacgacgacaagccatggatcaaaggccaaaaaaaaaaaaaaaaaaaaaaaaa

SEQ ID NO: 1504 - DNA, 59 bp, synthetic construct
  misc_feature 1..59: note = Description of sequence: Primer
  source 1..59: mol_type = other DNA
atggacgacgacgacaagtcggtatgtgaatcccaaaaaaaaaaaaaaaaaaaaaaaaa

SEQ ID NO: 1505 - DNA, 59 bp, synthetic construct
  misc_feature 1..59: note = Description of sequence: Primer
  source 1..59: mol_type = other DNA
atggacgacgacgacaagggttcatgatcgtatcaaaaaaaaaaaaaaaaaaaaaaaaa

SEQ ID NO: 1506 - DNA, 59 bp, synthetic construct
  misc_feature 1..59: note = Description of sequence: Primer
  source 1..59: mol_type = other DNA
atggacgacgacgacaagtaagattctccccttcaaaaaaaaaaaaaaaaaaaaaaaaa

SEQ ID NO: 1507 - DNA, 59 bp, synthetic construct
  misc_feature 1..59: note = Description of sequence: Primer
  source 1..59: mol_type = other DNA
atggacgacgacgacaagaaatctaactgccgtgaaaaaaaaaaaaaaaaaaaaaaaaa

SEQ ID NO: 1508 - DNA, 59 bp, synthetic construct
  misc_feature 1..59: note = Description of sequence: Primer
  source 1..59: mol_type = other DNA
atggacgacgacgacaagtactgatcatttccgcaaaaaaaaaaaaaaaaaaaaaaaaa

SEQ ID NO: 1509 - DNA, 59 bp, synthetic construct
  misc_feature 1..59: note = Description of sequence: Primer
  source 1..59: mol_type = other DNA
atggacgacgacgacaaggtaggatcacggcgttaaaaaaaaaaaaaaaaaaaaaaaaa

SEQ ID NO: 1510 - DNA, 59 bp, synthetic construct
  misc_feature 1..59: note = Description of sequence: Primer
  source 1..59: mol_type = other DNA
atggacgacgacgacaagcttgatgtcgtcaatcaaaaaaaaaaaaaaaaaaaaaaaaa

SEQ ID NO: 1511 - DNA, 59 bp, synthetic construct
  misc_feature 1..59: note = Description of sequence: Primer
  source 1..59: mol_type = other DNA
atggacgacgacgacaagggaagtctagcgagtcaaaaaaaaaaaaaaaaaaaaaaaaa

SEQ ID NO: 1512 - DNA, 59 bp, synthetic construct
  misc_feature 1..59: note = Description of sequence: Primer
  source 1..59: mol_type = other DNA
atggacgacgacgacaagtctctgctcgaggagtaaaaaaaaaaaaaaaaaaaaaaaaa

SEQ ID NO: 1513 - DNA, 59 bp, synthetic construct
  misc_feature 1..59: note = Description of sequence: Primer
  source 1..59: mol_type = other DNA
atggacgacgacgacaagctttgcacgagagccaaaaaaaaaaaaaaaaaaaaaaaaaa

SEQ ID NO: 1514 - DNA, 59 bp, synthetic construct
  misc_feature 1..59: note = Description of sequence: Primer
  source 1..59: mol_type = other DNA
atggacgacgacgacaagactttaccaatggcgaaaaaaaaaaaaaaaaaaaaaaaaaa

SEQ ID NO: 1515 - DNA, 59 bp, synthetic construct
  misc_feature 1..59: note = Description of sequence: Primer
  source 1..59: mol_type = other DNA
atggacgacgacgacaaggcagaatagcgactcgaaaaaaaaaaaaaaaaaaaaaaaaa

SEQ ID NO: 1516 - DNA, 59 bp, synthetic construct
  misc_feature 1..59: note = Description of sequence: Primer
  source 1..59: mol_type = other DNA
atggacgacgacgacaagcgaacgttgcgtttggaaaaaaaaaaaaaaaaaaaaaaaaa

SEQ ID NO: 1517 - DNA, 59 bp, synthetic construct
  misc_feature 1..59: note = Description of sequence: Primer
  source 1..59: mol_type = other DNA
atggacgacgacgacaagtgaagtctcgaagtgaaaaaaaaaaaaaaaaaaaaaaaaaa

SEQ ID NO: 1518 - DNA, 59 bp, synthetic construct
  misc_feature 1..59: note = Description of sequence: Primer
  source 1..59: mol_type = other DNA
atggacgacgacgacaagcccttgggcataaaacaaaaaaaaaaaaaaaaaaaaaaaaa

SEQ ID NO: 1519 - DNA, 59 bp, synthetic construct
  misc_feature 1..59: note = Description of sequence: Primer
  source 1..59: mol_type = other DNA
atggacgacgacgacaagggctagcagttgagtgaaaaaaaaaaaaaaaaaaaaaaaaa

SEQ ID NO: 1520 - DNA, 59 bp, synthetic construct
  misc_feature 1..59: note = Description of sequence: Primer
  source 1..59: mol_type = other DNA
atggacgacgacgacaagatgggctatggtggtaaaaaaaaaaaaaaaaaaaaaaaaaa

SEQ ID NO: 1521 - DNA, 59 bp, synthetic construct
  misc_feature 1..59: note = Description of sequence: Primer
  source 1..59: mol_type = other DNA
atggacgacgacgacaagtaccactaggaatcagaaaaaaaaaaaaaaaaaaaaaaaaa

SEQ ID NO: 1522 - DNA, 59 bp, synthetic construct
  misc_feature 1..59: note = Description of sequence: Primer
  source 1..59: mol_type = other DNA
atggacgacgacgacaagacataggggcattgagaaaaaaaaaaaaaaaaaaaaaaaaa

SEQ ID NO: 1523 - DNA, 59 bp, synthetic construct
  misc_feature 1..59: note = Description of sequence: Primer
  source 1..59: mol_type = other DNA
atggacgacgacgacaaggttcatagatagcgcaaaaaaaaaaaaaaaaaaaaaaaaaa

SEQ ID NO: 1524 - DNA, 59 bp, synthetic construct
  misc_feature 1..59: note = Description of sequence: Primer
  source 1..59: mol_type = other DNA
atggacgacgacgacaagtggctttcctaacagcaaaaaaaaaaaaaaaaaaaaaaaaa

SEQ ID NO: 1525 - DNA, 59 bp, synthetic construct
  misc_feature 1..59: note = Description of sequence: Primer
  source 1..59: mol_type = other DNA
atggacgacgacgacaaggaagcgtccatatgacaaaaaaaaaaaaaaaaaaaaaaaaa

SEQ ID NO: 1526 - DNA, 59 bp, synthetic construct
  misc_feature 1..59: note = Description of sequence: Primer
  source 1..59: mol_type = other DNA
atggacgacgacgacaagcacaagcgactctttcaaaaaaaaaaaaaaaaaaaaaaaaa

SEQ ID NO: 1527 - DNA, 59 bp, synthetic construct
  misc_feature 1..59: note = Description of sequence: Primer
  source 1..59: mol_type = other DNA
atggacgacgacgacaagaagatattccgcgtgcaaaaaaaaaaaaaaaaaaaaaaaaa

SEQ ID NO: 1528 - DNA, 59 bp, synthetic construct
  misc_feature 1..59: note = Description of sequence: Primer
  source 1..59: mol_type = other DNA
atggacgacgacgacaaggtccaaatcacaccgtaaaaaaaaaaaaaaaaaaaaaaaaa

SEQ ID NO: 1529 - DNA, 59 bp, synthetic construct
  misc_feature 1..59: note = Description of sequence: Primer
  source 1..59: mol_type = other DNA
atggacgacgacgacaaggacgtcatcgtacctgaaaaaaaaaaaaaaaaaaaaaaaaa

SEQ ID NO: 1530 - DNA, 59 bp, synthetic construct
  misc_feature 1..59: note = Description of sequence: Primer
  source 1..59: mol_type = other DNA
atggacgacgacgacaagacagctgctgtgcatcaaaaaaaaaaaaaaaaaaaaaaaaa

SEQ ID NO: 1531 - DNA, 59 bp, synthetic construct
  misc_feature 1..59: note = Description of sequence: Primer
  source 1..59: mol_type = other DNA
atggacgacgacgacaagttgtaacagtgcaacgaaaaaaaaaaaaaaaaaaaaaaaaa

SEQ ID NO: 1532 - DNA, 59 bp, synthetic construct
  misc_feature 1..59: note = Description of sequence: Primer
  source 1..59: mol_type = other DNA
atggacgacgacgacaagagctgttatgcgccgtaaaaaaaaaaaaaaaaaaaaaaaaa

SEQ ID NO: 1533 - DNA, 59 bp, synthetic construct
  misc_feature 1..59: note = Description of sequence: Primer
  source 1..59: mol_type = other DNA
atggacgacgacgacaagttgcccaaaaccctgtaaaaaaaaaaaaaaaaaaaaaaaaa

SEQ ID NO: 1534 - DNA, 59 bp, synthetic construct
  misc_feature 1..59: note = Description of sequence: Primer
  source 1..59: mol_type = other DNA
atggacgacgacgacaagagctaagtcgctggtaaaaaaaaaaaaaaaaaaaaaaaaaa

SEQ ID NO: 1535 - DNA, 59 bp, synthetic construct
  misc_feature 1..59: note = Description of sequence: Primer
  source 1..59: mol_type = other DNA
atggacgacgacgacaagtcctgtaattacgcctaaaaaaaaaaaaaaaaaaaaaaaaa

SEQ ID NO: 1536 - DNA, 59 bp, synthetic construct
  misc_feature 1..59: note = Description of sequence: Primer
  source 1..59: mol_type = other DNA
atggacgacgacgacaagcgcctgatcctttgagaaaaaaaaaaaaaaaaaaaaaaaaa

SEQ ID NO: 1537 - DNA, 59 bp, synthetic construct
  misc_feature 1..59: note = Description of sequence: Primer
  source 1..59: mol_type = other DNA
atggacgacgacgacaagacctctgtcgagttacaaaaaaaaaaaaaaaaaaaaaaaaa

SEQ ID NO: 1538 - DNA, 59 bp, synthetic construct
  misc_feature 1..59: note = Description of sequence: Primer
  source 1..59: mol_type = other DNA
atggacgacgacgacaaggacgttgtagcaggataaaaaaaaaaaaaaaaaaaaaaaaa

SEQ ID NO: 1539 - DNA, 59 bp, synthetic construct
  misc_feature 1..59: note = Description of sequence: Primer
  source 1..59: mol_type = other DNA
atggacgacgacgacaagatggctcaacgaggagaaaaaaaaaaaaaaaaaaaaaaaaa

SEQ ID NO: 1540 - DNA, 59 bp, synthetic construct
  misc_feature 1..59: note = Description of sequence: Primer
  source 1..59: mol_type = other DNA
atggacgacgacgacaagagaggtacatgagaggaaaaaaaaaaaaaaaaaaaaaaaaa

SEQ ID NO: 1541 - DNA, 59 bp, synthetic construct
  misc_feature 1..59: note = Description of sequence: Primer
  source 1..59: mol_type = other DNA
atggacgacgacgacaagtgacagcccatctcgtaaaaaaaaaaaaaaaaaaaaaaaaa

SEQ ID NO: 1542 - DNA, 59 bp, synthetic construct
  misc_feature 1..59: note = Description of sequence: Primer
  source 1..59: mol_type = other DNA
atggacgacgacgacaagtgacaacgccatgtctaaaaaaaaaaaaaaaaaaaaaaaaa

SEQ ID NO: 1543 - DNA, 59 bp, synthetic construct
  misc_feature 1..59: note = Description of sequence: Primer
  source 1..59: mol_type = other DNA
atggacgacgacgacaaggggttacaacgtatagaaaaaaaaaaaaaaaaaaaaaaaaa

SEQ ID NO: 1544 - DNA, 59 bp, synthetic construct
  misc_feature 1..59: note = Description of sequence: Primer
  source 1..59: mol_type = other DNA
atggacgacgacgacaagcatacgatcacggacgaaaaaaaaaaaaaaaaaaaaaaaaa

SEQ ID NO: 1545 - DNA, 59 bp, synthetic construct
  misc_feature 1..59: note = Description of sequence: Primer
  source 1..59: mol_type = other DNA
atggacgacgacgacaagtaccccggctatcaacaaaaaaaaaaaaaaaaaaaaaaaaa

SEQ ID NO: 1546 - DNA, 59 bp, synthetic construct
  misc_feature 1..59: note = Description of sequence: Primer
  source 1..59: mol_type = other DNA
atggacgacgacgacaagatgaaactcaccgcaaaaaaaaaaaaaaaaaaaaaaaaaaa

SEQ ID NO: 1547 - DNA, 59 bp, synthetic construct
  misc_feature 1..59: note = Description of sequence: Primer
  source 1..59: mol_type = other DNA
atggacgacgacgacaagcctatatccattcctgaaaaaaaaaaaaaaaaaaaaaaaaa

SEQ ID NO: 1548 - DNA, 59 bp, synthetic construct
  misc_feature 1..59: note = Description of sequence: Primer
  source 1..59: mol_type = other DNA
atggacgacgacgacaagtagcattaacagcgtgaaaaaaaaaaaaaaaaaaaaaaaaa

SEQ ID NO: 1549 - protein, 11 aa, synthetic construct
  REGION 1..11: note = Description of sequence: CRD3 from table 3
CGGQAGTALIF

SEQ ID NO: 1550 - protein, 11 aa, synthetic construct
  REGION 1..11: note = Description of sequence: CRD3 from table 3
CAVNGGNQFYF

SEQ ID NO: 1551 - protein, 11 aa, synthetic construct
  REGION 1..11: note = Description of sequence: CRD3 from table 3
CAVGRDDKIIF

SEQ ID NO: 1552 - protein, 13 aa, synthetic construct
  REGION 1..13: note = Description of sequence: CRD3 from table 3
CATCMDSNYQLIW

SEQ ID NO: 1553 - protein, 13 aa, synthetic construct
  REGION 1..13: note = Description of sequence: CRD3 from table 3
CAVTTDSWGKLQF

SEQ ID NO: 1554 - protein, 13 aa, synthetic construct
  REGION 1..13: note = Description of sequence: CRD3 from table 3
CAVNPGGADGLTF

SEQ ID NO: 1555 - protein, 12 aa, synthetic construct
  REGION 1..12: note = Description of sequence: CRD3 from table 3
CAVSGSARQLTF

SEQ ID NO: 1556 - protein, 15 aa, synthetic construct
  REGION 1..15: note = Description of sequence: CRD3 from table 3
CAVNPRDNYGQNFVF

SEQ ID NO: 1557 - protein, 11 aa, synthetic construct
  REGION 1..11: note = Description of sequence: CRD3 from table 3
CAAGGSYIPTF

SEQ ID NO: 1558 - protein, 12 aa, synthetic construct
  REGION 1..12: note = Description of sequence: CRD3 from table 3
CAVNTGFQKLVF

SEQ ID NO: 1559 - protein, 11 aa, synthetic construct
  REGION 1..11: note = Description of sequence: CRD3 from table 3
CAVNGNNRLAF

SEQ ID NO: 1560 - protein, 14 aa, synthetic construct
  REGION 1..14: note = Description of sequence: CRD3 from table 3
CAVQGGGSQGNLIF

SEQ ID NO: 1561 - protein, 12 aa, synthetic construct
  REGION 1..12: note = Description of sequence: CRD3 from table 3
CAAGGSQGNLIF

SEQ ID NO: 1562 - protein, 8 aa, synthetic construct
  REGION 1..8: note = Description of sequence: CRD3 from table 3
CAVNIPTF

SEQ ID NO: 1563 - protein, 12 aa, synthetic construct
  REGION 1..12: note = Description of sequence: CRD3 from table 3
CAVSGTASKLTF

SEQ ID NO: 1564 - protein, 14 aa, synthetic construct
  REGION 1..14: note = Description of sequence: CRD3 from table 3
CAEKGGGGADGLTF

SEQ ID NO: 1565 - protein, 14 aa, synthetic construct
  REGION 1..14: note = Description of sequence: CRD3 from table 3
CAASKEAAGNKLTF

SEQ ID NO: 1566 - protein, 14 aa, synthetic construct
  REGION 1..14: note = Description of sequence: CRD3 from table 3
CIVRGFAYGQNFVF

SEQ ID NO: 1567 - protein, 11 aa, synthetic construct
  REGION 1..11: note = Description of sequence: CRD3 from table 3
CAVSDGQKLLF

SEQ ID NO: 1568 - protein, 13 aa, synthetic construct
  REGION 1..13: note = Description of sequence: CRD3 from table 3
CAVTRGGADGLTF

SEQ ID NO: 1569 - protein, 13 aa, synthetic construct
  REGION 1..13: note = Description of sequence: CRD3 from table 3
CAENRDGDDKIIF

SEQ ID NO: 1570 - protein, 13 aa, synthetic construct
  REGION 1..13: note = Description of sequence: CRD3 from table 3
CAASGGGADGLTF

SEQ ID NO: 1571 - protein, 9 aa, synthetic construct
  REGION 1..9: note = Description of sequence: CRD3 from table 3
CAVRTQIIF

SEQ ID NO: 1572 - protein, 17 aa, synthetic construct
  REGION 1..17: note = Description of sequence: CRD3 from table 3
CAVRSERSGGGADGLTF

SEQ ID NO: 1573 - protein, 10 aa, synthetic construct
  REGION 1..10: note = Description of sequence: CRD3 from table 3
CAVNDYKLSF

SEQ ID NO: 1574 - protein, 7 aa, synthetic construct
  REGION 1..7: note = Description of sequence: CRD3 from table 3
CAAEFYF

SEQ ID NO: 1575 - protein, 11 aa, synthetic construct
  REGION 1..11: note = Description of sequence: CRD3 from table 3
CASDNNARLMF

SEQ ID NO: 1576 - protein, 14 aa, synthetic construct
  REGION 1..14: note = Description of sequence: CRD3 from table 3
CAVIRSGGYNKLIF

SEQ ID NO: 1577 - protein, 13 aa, synthetic construct
  REGION 1..13: note = Description of sequence: CRD3 from table 3
CAGFSGGYNKLIF

SEQ ID NO: 1578 - protein, 13 aa, synthetic construct
  REGION 1..13: note = Description of sequence: CRD3 from table 3
CTSRVSDGQKLLF

SEQ ID NO: 1579 - protein, 10 aa, synthetic construct
  REGION 1..10: note = Description of sequence: CRD3 from table 3
CVVNNDKIIF

SEQ ID NO: 1580 - protein, 14 aa, synthetic construct
  REGION 1..14: note = Description of sequence: CRD3 from table 3
CVVNEYSSASKIIF

SEQ ID NO: 1581 - protein, 10 aa, synthetic construct
  REGION 1..10: note = Description of sequence: CRD3 from table 3
CVVAEARLMF

SEQ ID NO: 1582 - protein, 13 aa, synthetic construct
  REGION 1..13: note = Description of sequence: CRD3 from table 3
CAVNGANDYKLSF

SEQ ID NO: 1583 - protein, 11 aa, synthetic construct
  REGION 1..11: note = Description of sequence: CRD3 from table 3
CAYSMLDRLMF

SEQ ID NO: 1584 - protein, 13 aa, synthetic construct
  REGION 1..13: note = Description of sequence: CRD3 from table 3
CAVGSDSSYKLIF

SEQ ID NO: 1585 - protein, 14 aa, synthetic construct
  REGION 1..14: note = Description of sequence: CRD3 from table 3
CAVGIYNQGGKLIF

SEQ ID NO: 1586 - protein, 11 aa, synthetic construct
  REGION 1..11: note = Description of sequence: CRD3 from table 3
CAVRRDDKIIF

SEQ ID NO: 1587 - protein, 13 aa, synthetic construct
  REGION 1..13: note = Description of sequence: CRD3 from table 3
CAVNEGTGNQFYF

SEQ ID NO: 1588 - protein, 13 aa, synthetic construct
  REGION 1..13: note = Description of sequence: CRD3 from table 3
CAVKGGGADGLTF

SEQ ID NO: 1589 - protein, 12 aa, synthetic construct
  REGION 1..12: note = Description of sequence: CRD3 from table 3
CAEGGGADGLTF

SEQ ID NO: 1590 - protein, 14 aa, synthetic construct
  REGION 1..14: note = Description of sequence: CRD3 from table 3
CVVNMGKNGQKLLF

SEQ ID NO: 1591 - protein, 15 aa, synthetic construct
  REGION 1..15: note = Description of sequence: CRD3 from table 3
CAALISNFGNEKLTF

SEQ ID NO: 1592 - protein, 12 aa, synthetic construct
  REGION 1..12: note = Description of sequence: CRD3 from table 3
CAGGGSQGNLIF

SEQ ID NO: 1593 - protein, 13 aa, synthetic construct
  REGION 1..13: note = Description of sequence: CRD3 from table 3
CASLGQGAQKLVF

SEQ ID NO: 1594 - protein, 12 aa, synthetic construct
  REGION 1..12: note = Description of sequence: CRD3 from table 3
CAVNQAGTALIF

SEQ ID NO: 1595 - protein, 12 aa, synthetic construct
  REGION 1..12: note = Description of sequence: CRD3 from table 3
CAEYSSASKIIF

SEQ ID NO: 1596 - protein, 14 aa, synthetic construct
  REGION 1..14: note = Description of sequence: CRD3 from table 3
CAVNRDSGTYKYIF

SEQ ID NO: 1597 - protein, 14 aa, synthetic construct
  REGION 1..14: note = Description of sequence: CRD3 from table 3
CASISLDSNYQLIW

SEQ ID NO: 1598 - protein, 14 aa, synthetic construct
  REGION 1..14: note = Description of sequence: CRD3 from table 3
CAVGREAAGNKLTF

SEQ ID NO: 1599 - protein, 16 aa, synthetic construct
  REGION 1..16: note = Description of sequence: CRD3 from table 3
CALSRPSRGSQGNLIF

SEQ ID NO: 1600 - protein, 15 aa, synthetic construct
  REGION 1..15: note = Description of sequence: CRD3 from table 3
CIVAAISGSARQLTF

SEQ ID NO: 1601 - protein, 13 aa, synthetic construct
  REGION 1..13: note = Description of sequence: CRD3 from table 3
CAVSGGGADGLTF

SEQ ID NO: 1602 - protein, 14 aa, synthetic construct
  REGION 1..14: note = Description of sequence: CRD3 from table 3
CAVNVQGGSEKLVF

SEQ ID NO: 1603 - protein, 12 aa, synthetic construct
  REGION 1..12: note = Description of sequence: CRD3 from table 3
CAVNKGFQKLVF

SEQ ID NO: 1604 - protein, 15 aa, synthetic construct
  REGION 1..15: note = Description of sequence: CRD3 from table 3
CATDGRGSTLGRLYF

SEQ ID NO: 1605 - protein, 13 aa, synthetic construct
  REGION 1..13: note = Description of sequence: CRD3 from table 3
CAMSESDGQKLLF

SEQ ID NO: 1606 - protein, 13 aa, synthetic construct
  REGION 1..13: note = Description of sequence: CRD3 from table 3
CAPPGDGNNRLAF

SEQ ID NO: 1607 - protein, 14 aa, synthetic construct
  REGION 1..14: note = Description of sequence: CRD3 from table 3
CAGAGGGSQGNLIF

SEQ ID NO: 1608 - protein, 12 aa, synthetic construct
  REGION 1..12: note = Description of sequence: CRD3 from table 3
CAVNSDGQKLLF

SEQ ID NO: 1609 - protein, 14 aa, synthetic construct
  REGION 1..14: note = Description of sequence: CRD3 from table 3
CAVRDMGSNYQLIW

SEQ ID NO: 1610 - protein, 12 aa, synthetic construct
  REGION 1..12: note = Description of sequence: CRD3 from table 3
CAASASTDKLIF

SEQ ID NO: 1611 - protein, 18 aa, synthetic construct
  REGION 1..18: note = Description of sequence: CRD3 from table 3
CAGASTGGDSGNTGKLIF

SEQ ID NO: 1612 - protein, 15 aa, synthetic construct
  REGION 1..15: note = Description of sequence: CRD3 from table 3
CAMSLSNFGNEKLTF

SEQ ID NO: 1613 - protein, 13 aa, synthetic construct
  REGION 1..13: note = Description of sequence: CRD3 from table 3
CAVILQGAQKLVF

SEQ ID NO: 1614 - protein, 11 aa, synthetic construct
  REGION 1..11: note = Description of sequence: CRD3 from table 3
CADYYGQNFVF

SEQ ID NO: 1615 - protein, 13 aa, synthetic construct
  REGION 1..13: note = Description of sequence: CRD3 from table 3
CAGQTGNTGKLIF

SEQ ID NO: 1616 - protein, 14 aa, synthetic construct
  REGION 1..14: note = Description of sequence: CRD3 from table 3
CAGPMKTSYDKVIF

SEQ ID NO: 1617 - protein, 11 aa, synthetic construct
  REGION 1..11: note = Description of sequence: CRD3 from table 3
CARNTGNQFYF

SEQ ID NO: 1618 - protein, 13 aa, synthetic construct
  REGION 1..13: note = Description of sequence: CRD3 from table 3
CGTLRNNNARLMF

SEQ ID NO: 1619 - protein, 15 aa, synthetic construct
  REGION 1..15: note = Description of sequence: CRD3 from table 3
CAGDKGGGSQGNLIF

SEQ ID NO: 1620 - protein, 15 aa, synthetic construct
  REGION 1..15: note = Description of sequence: CRD3 from table 3
CAVTGGGTSYGKLTF

SEQ ID NO: 1621 - protein, 15 aa, synthetic construct
  REGION 1..15: note = Description of sequence: CRD3 from table 3
CAVTAGGTSYGKLTF

SEQ ID NO: 1622 - protein, 13 aa, synthetic construct
  REGION 1..13: note = Description of sequence: CRD3 from table 3
CAVYSGGYNKLIF

SEQ ID NO: 1623 - protein, 12 aa, synthetic construct
  REGION 1..12: note = Description of sequence: CRD3 from table 3
CALPSGNTPLVF

SEQ ID NO: 1624 - protein, 14 aa, synthetic construct
  REGION 1..14: note = Description of sequence: CRD3 from table 3
CAYRSPPSSEKLVF

SEQ ID NO: 1625 - protein, 11 aa, synthetic construct
  REGION 1..11: note = Description of sequence: CRD3 from table 3
CAVKDGQNFVF

SEQ ID NO: 1626 - protein, 14 aa, synthetic construct
  REGION 1..14: note = Description of sequence: CRD3 from table 3
CALSPGYNFNKFYF

SEQ ID NO: 1627 - protein, 16 aa, synthetic construct
  REGION 1..16: note = Description of sequence: CRD3 from table 3
CAVSSITQGGSEKLVF

SEQ ID NO: 1628 - protein, 12 aa, synthetic construct
  REGION 1..12: note = Description of sequence: CRD3 from table 3
CASSYSENEQFF

SEQ ID NO: 1629 - protein, 15 aa, synthetic construct
  REGION 1..15: note = Description of sequence: CRD3 from table 3
CASRSYVASSNEQFF

SEQ ID NO: 1630 - protein, 15 aa, synthetic construct
  REGION 1..15: note = Description of sequence: CRD3 from table 3
CASTQWYGGGTPPYF

SEQ ID NO: 1631 - protein, 16 aa, synthetic construct
  REGION 1..16: note = Description of sequence: CRD3 from table 3
CASSLTTGVFSQPQHF

SEQ ID NO: 1632 - protein, 17 aa, synthetic construct
  REGION 1..17: note = Description of sequence: CRD3 from table 3
CATSPYSVTTFANTIYF

SEQ ID NO: 1633 - protein, 11 aa, synthetic construct
  REGION 1..11: note = Description of sequence: CRD3 from table 3
CAGMTVTEAFF

SEQ ID NO: 1634 - protein, 17 aa, synthetic construct
  REGION 1..17: note = Description of sequence: CRD3 from table 3
CASSQALLAPSTDTQYF

SEQ ID NO: 1635 - protein, 13 aa, synthetic construct
  REGION 1..13: note = Description of sequence: CRD3 from table 3
CASSEGGIGELFF

SEQ ID NO: 1636 - protein, 13 aa, synthetic construct
  REGION 1..13: note = Description of sequence: CRD3 from table 3
CASSQDTDGRMFF

SEQ ID NO: 1637 - protein, 16 aa, synthetic construct
  REGION 1..16: note = Description of sequence: CRD3 from table 3
CASSEAPGTSVGGLFF

SEQ ID NO: 1638 - protein, 13 aa, synthetic construct
  REGION 1..13: note = Description of sequence: CRD3 from table 3
CASTTGDGLGAFF

SEQ ID NO: 1639 - protein, 14 aa, synthetic construct
  REGION 1..14: note = Description of sequence: CRD3 from table 3
CASSQDIGNFEQFF

SEQ ID NO: 1640 - protein, 17 aa, synthetic construct
  REGION 1..17: note = Description of sequence: CRD3 from table 3
CASSGTGGYSGANVLTF

SEQ ID NO: 1641 - protein, 12 aa, synthetic construct
  REGION 1..12: note = Description of sequence: CRD3 from table 3
CASSEANEKLFF

SEQ ID NO: 1642 - protein, 15 aa, synthetic construct
  REGION 1..15: note = Description of sequence: CRD3 from table 3
CASSQAPLASGGYTF

SEQ ID NO: 1643 - protein, 16 aa, synthetic construct
  REGION 1..16: note = Description of sequence: CRD3 from table 3
CASSLAGQVFSGELFF

SEQ ID NO: 1644 - protein, 15 aa, synthetic construct
  REGION 1..15: note = Description of sequence: CRD3 from table 3
CASSQGTINTGELFF

SEQ ID NO: 1645 - protein, 12 aa, synthetic construct
  REGION 1..12: note = Description of sequence: CRD3 from table 3
CSARDGTSSGYF

SEQ ID NO: 1646 - protein, 15 aa, synthetic construct
  REGION 1..15: note = Description of sequence: CRD3 from table 3
CASMPRGFPSDEQFF

SEQ ID NO: 1647 - protein, 13 aa, synthetic construct
  REGION 1..13: note = Description of sequence: CRD3 from table 3
CASSQDWVAEQYF

SEQ ID NO: 1648 - protein, 13 aa, synthetic construct
  REGION 1..13: note = Description of sequence: CRD3 from table 3
CASSYGTGDGYTF

SEQ ID NO: 1649 - protein, 13 aa, synthetic construct
  REGION 1..13: note = Description of sequence: CRD3 from table 3
CASSLGLGQPQHF

SEQ ID NO: 1650 - protein, 16 aa, synthetic construct
  REGION 1..16: note = Description of sequence: CRD3 from table 3
CASSSRDRSSSTEAFF

SEQ ID NO: 1651 - protein, 14 aa, synthetic construct
  REGION 1..14: note = Description of sequence: CRD3 from table 3
CASSQAGVGGELFF

SEQ ID NO: 1652 - protein, 15 aa, synthetic construct
  REGION 1..15: note = Description of sequence: CRD3 from table 3
CASSLPGLASHEQFF

SEQ ID NO: 1653 - protein, 14 aa, synthetic construct
  REGION 1..14: note = Description of sequence: CRD3 from table 3
CASSYSGLGQPQHF

SEQ ID NO: 1654 - protein, 13 aa, synthetic construct
  REGION 1..13: note = Description of sequence: CRD3 from table 3
CASSSTVYNEQFF

SEQ ID NO: 1655 - protein, 15 aa, synthetic construct
  REGION 1..15: note = Description of sequence: CRD3 from table 3
CASSRSPGGVYEQYF

SEQ ID NO: 1656 - protein, 15 aa, synthetic construct
  REGION 1..15: note = Description of sequence: CRD3 from table 3
CASSPSPAGAYEQYF

SEQ ID NO: 1657 - protein, 14 aa, synthetic construct
  REGION 1..14: note = Description of sequence: CRD3 from table 3
CASSWTGANYGYTF

SEQ ID NO: 1658 - protein, 14 aa, synthetic construct
  REGION 1..14: note = Description of sequence: CRD3 from table 3
CASSPNLAGEEQYF

SEQ ID NO: 1659 - protein, 13 aa, synthetic construct
  REGION 1..13: note = Description of sequence: CRD3 from table 3
CASSLGQGQPQHF

SEQ ID NO: 1660 - protein, 15 aa, synthetic construct
  REGION 1..15: note = Description of sequence: CRD3 from table 3
CASSQEVVANNEQFF

SEQ ID NO: 1661 - protein, 14 aa, synthetic construct
  REGION 1..14: note = Description of sequence: CRD3 from table 3
CASSLGGNTGELFF

SEQ ID NO: 1662 - protein, 14 aa, synthetic construct
  REGION 1..14: note = Description of sequence: CRD3 from table 3
CASSLELAGGPAFF

SEQ ID NO: 1663 - protein, 14 aa, synthetic construct
  REGION 1..14: note = Description of sequence: CRD3 from table 3
CASRAGIQSGELFF

SEQ ID NO: 1664 - protein, 13 aa, synthetic construct
  REGION 1..13: note = Description of sequence: CRD3 from table 3
CASSPSGHYEQYF

SEQ ID NO: 1665 - protein, 14 aa, synthetic construct
  REGION 1..14: note = Description of sequence: CRD3 from table 3
CASSRGTGGYEQFF

SEQ ID NO: 1666 - protein, 12 aa, synthetic construct
  REGION 1..12: note = Description of sequence: CRD3 from table 3
CASSLSGDEQYF

SEQ ID NO: 1667 - protein, 16 aa, synthetic construct
  REGION 1..16: note = Description of sequence: CRD3 from table 3
CASSLTPSASGYEQYF

SEQ ID NO: 1668 - protein, 12 aa, synthetic construct
  REGION 1..12: note = Description of sequence: CRD3 from table 3
CASSQGWDEQYF

SEQ ID NO: 1669 - protein, 15 aa, synthetic construct
  REGION 1..15: note = Description of sequence: CRD3 from table 3
CASSTLSGNYNEQFF

SEQ ID NO: 1670 - protein, 11 aa, synthetic construct
  REGION 1..11: note = Description of sequence: CRD3 from table 3
CASGSVPEQYF

SEQ ID NO: 1671 - protein, 15 aa, synthetic construct
  REGION 1..15: note = Description of sequence: CRD3 from table 3
CASSPGTGGTYEQYF

SEQ ID NO: 1672 - protein, 17 aa, synthetic construct
  REGION 1..17: note = Description of sequence: CRD3 from table 3
CASSGLAGFSPQETQYF

SEQ ID NO: 1673 - protein, 14 aa, synthetic construct
  REGION 1..14: note = Description of sequence: CRD3 from table 3
CASSGGTGAYEQYF

SEQ ID NO: 1674 - protein, 13 aa, synthetic construct
  REGION 1..13: note = Description of sequence: CRD3 from table 3
CASSAGASIEQYF

SEQ ID NO: 1675 - protein, 16 aa, synthetic construct
  REGION 1..16: note = Description of sequence: CRD3 from table 3
CASSLGQGGVGEKLFF

SEQ ID NO: 1676 - protein, 13 aa, synthetic construct
  REGION 1..13: note = Description of sequence: CRD3 from table 3
CATRKSYNSPLHF

SEQ ID NO: 1677 - protein, 14 aa, synthetic construct
  REGION 1..14: note = Description of sequence: CRD3 from table 3
CASSQAQGTYEQYF

SEQ ID NO: 1678 - protein, 13 aa, synthetic construct
  REGION 1..13: note = Description of sequence: CRD3 from table 3
CASSLGWGYEQYF

SEQ ID NO: 1679 - protein, 13 aa, synthetic construct
  REGION 1..13: note = Description of sequence: CRD3 from table 3
CASSPGLDYEQYF

SEQ ID NO: 1680 - protein, 13 aa, synthetic construct
  REGION 1..13: note = Description of sequence: CRD3 from table 3
CASTRQFNQPQHF

SEQ ID NO: 1681 - protein, 13 aa, synthetic construct
  REGION 1..13: note = Description of sequence: CRD3 from table 3
CASSQGGGTEAFF

SEQ ID NO: 1682 - protein, 13 aa, synthetic construct
  REGION 1..13: note = Description of sequence: CRD3 from table 3
CSALTGSSYEQYF

SEQ ID NO: 1683 - protein, 11 aa, synthetic construct
  REGION 1..11: note = Description of sequence: CRD3 from table 3
CASSGGYEQYF

SEQ ID NO: 1684 - protein, 13 aa, synthetic construct
  REGION 1..13: note = Description of sequence: CRD3 from table 3
CASSFGDSYEQYF

SEQ ID NO: 1685 - protein, 14 aa, synthetic construct
  REGION 1..14: note = Description of sequence: CRD3 from table 3
CASSLSGSSYEQYF

SEQ ID NO: 1686 - protein, 15 aa, synthetic construct
  REGION 1..15: note = Description of sequence: CRD3 from table 3
CAISEASGVTYEQYF

SEQ ID NO: 1687 - protein, 13 aa, synthetic construct
  REGION 1..13: note = Description of sequence: CRD3 from table 3
CASSQGQGYEQYF

SEQ ID NO: 1688 - protein, 14 aa, synthetic construct
  REGION 1..14: note = Description of sequence: CRD3 from table 3
CASSGSRVPYEQYF

SEQ ID NO: 1689 - protein, 15 aa, synthetic construct
  REGION 1..15: note = Description of sequence: CRD3 from table 3
CASSQTGTGAYEQYF

SEQ ID NO: 1690 - protein, 11 aa, synthetic construct
  REGION 1..11: note = Description of sequence: CRD3 from table 3
CSANRQGSIYF

SEQ ID NO: 1691 - protein, 13 aa, synthetic construct
  REGION 1..13: note = Description of sequence: CRD3 from table 3
CASSFEWSYEQYF

SEQ ID NO: 1692 - protein, 12 aa, synthetic construct
  REGION 1..12: note = Description of sequence: CRD3 from table 3
CASSHRGYEQYF

SEQ ID NO: 1693 - protein, 17 aa, synthetic construct
  REGION 1..17: note = Description of sequence: CRD3 from table 3
CASSPIDRAGGPYEQYF

SEQ ID NO: 1694 - protein, 16 aa, synthetic construct
  REGION 1..16: note = Description of sequence: CRD3 from table 3
CASSLTSGSFAGELFF

SEQ ID NO: 1695 - protein, 14 aa, synthetic construct
  REGION 1..14: note = Description of sequence: CRD3 from table 3
CASSPQGSGGEAFF

SEQ ID NO: 1696 - protein, 13 aa, synthetic construct
  REGION 1..13: note = Description of sequence: CRD3 from table 3
CASSYGGGYEQYF

SEQ ID NO: 1697 - protein, 13 aa, synthetic construct
  REGION 1..13: note = Description of sequence: CRD3 from table 3
CASSALGINEQFF

SEQ ID NO: 1698 - protein, 14 aa, synthetic construct
  REGION 1..14: note = Description of sequence: CRD3 from table 3
CASSWTGGGQPQHF

SEQ ID NO: 1699 - protein, 13 aa, synthetic construct
  REGION 1..13: note = Description of sequence: CRD3 from table 3
CASNQGPGNTIYF

SEQ ID NO: 1700 - protein, 11 aa, synthetic construct
  REGION 1..11: note = Description of sequence: CRD3 from table 3
CASSDSYEQYF

SEQ ID NO: 1701 - protein, 14 aa, synthetic construct
  REGION 1..14: note = Description of sequence: CRD3 from table 3
CASSLVPLSPEQYF

SEQ ID NO: 1702 - protein, 15 aa, synthetic construct
  REGION 1..15: note = Description of sequence: CRD3 from table 3
CASSLGAGGGGTQYF

SEQ ID NO: 1703 - protein, 16 aa, synthetic construct
  REGION 1..16: note = Description of sequence: CRD3 from table 3
CASSQQGVWGTGELFF

SEQ ID NO: 1704 - protein, 13 aa, synthetic construct
  REGION 1..13: note = Description of sequence: CRD3 from table 3
CASSPRSTDTQYF

SEQ ID NO: 1705 - protein, 13 aa, synthetic construct
  REGION 1..13: note = Description of sequence: CRD3 from table 3
CASSFQGYTEAFF

SEQ ID NO: 1706 - protein, 14 aa, synthetic construct
  REGION 1..14: note = Description of sequence: CRD3 from table 3
CASSYAQGAETQYF

SEQ ID NO: 1707 - protein, 16 aa, synthetic construct
  REGION 1..16: note = Description of sequence: CRD3 from table 3
CASSLGLADPNNEQFF

SEQ ID NO: 1708 - protein, 20 aa, synthetic construct
  REGION 1..20: note = Description of sequence: CRD3 from table 3
CSARDGGLAGEQKVGDTQYF

SEQ ID NO: 1709 - protein, 14 aa, synthetic construct
  REGION 1..14: note = Description of sequence: CRD3 from table 3
CSARGAGVPYEQYF

SEQ ID NO: 1710 - protein, 16 aa, synthetic construct
  REGION 1..16: note = Description of sequence: CRD3 from table 3
CASSVGVSGSFYEQYF

SEQ ID NO: 1711 - protein, 12 aa, synthetic construct
  REGION 1..12: note = Description of sequence: CRD3 from table 3
CASWDRGNEQFF

SEQ ID NO: 1712 - protein, 12 aa, synthetic construct
  REGION 1..12: note = Description of sequence: CRD3 from table 3
CASSSANYGYTF

SEQ ID NO: 1713 - protein, 15 aa, synthetic construct
  REGION 1..15: note = Description of sequence: CRD3 from table 3
CASSQFRGGRDGYTF

SEQ ID NO: 1714 - protein, 15 aa, synthetic construct
  REGION 1..15: note = Description of sequence: CRD3 from table 3
CASSYSTGTAYGYTF

SEQ ID NO: 1715 - protein, 13 aa, synthetic construct
  REGION 1..13: note = Description of sequence: CRD3 from table 3
CASSIRSSYEQYF

SEQ ID NO: 1716 - protein, 14 aa, synthetic construct
  REGION 1..14: note = Description of sequence: CRD3 from table 3
CASSARDFAYEQYF

SEQ ID NO: 1717 - protein, 13 aa, synthetic construct
  REGION 1..13: note = Description of sequence: CRD3 from table 3
CASSFALSNEAFF

SEQ ID NO: 1718 - protein, 9 aa, synthetic construct
  REGION 1..9: note = Description of sequence: CRD3 from table 3
CASDEKLFF

SEQ ID NO: 1719 - protein, 13 aa, synthetic construct
  REGION 1..13: note = Description of sequence: CRD3 from table 3
CASSFAGTTEAFF

SEQ ID NO: 1720 - protein, 14 aa, synthetic construct
  REGION 1..14: note = Description of sequence: CRD3 from table 3
CSVTGTGLFDEQYF

SEQ ID NO: 1721 - protein, 13 aa, synthetic construct
  REGION 1..13: note = Description of sequence: CRD3 from table 3
CASSFVNTGELFF

SEQ ID NO: 1722 - protein, 15 aa, synthetic construct
  REGION 1..15: note = Description of sequence: CRD3 from table 3
CASSDPGSGAYEQYF

SEQ ID NO: 1723 - protein, 15 aa, synthetic construct
  REGION 1..15: note = Description of sequence: CRD3 from table 3
CASSFLGTGLNEQYF

SEQ ID NO: 1724 - protein, 14 aa, synthetic construct
  REGION 1..14: note = Description of sequence: CDR3 from table 4
CAYRSPPSSEKLVF

SEQ ID NO: 1725 - protein, 12 aa, synthetic construct
  REGION 1..12: note = Description of sequence: CDR3 from table 4
CAVNSDGQKLLF

SEQ ID NO: 1726 - protein, 10 aa, synthetic construct
  REGION 1..10: note = Description of sequence: CDR3 from table 4
CAPGDDKIIF

SEQ ID NO: 1727 - protein, 16 aa, synthetic construct
  REGION 1..16: note = Description of sequence: CDR3 from table 4
CASSGLSSGGSYIPTF

SEQ ID NO: 1728 - protein, 13 aa, synthetic construct
  REGION 1..13: note = Description of sequence: CDR3 from table 4
CAYRLGGSEKLVF

SEQ ID NO: 1729 - protein, 15 aa, synthetic construct
  REGION 1..15: note = Description of sequence: CDR3 from table 4
CAMRGGLYNFNKFYF

SEQ ID NO: 1730 - protein, 10 aa, synthetic construct
  REGION 1..10: note = Description of sequence: CDR3 from table 4
CAVTDYKLSF

SEQ ID NO: 1731 - protein, 10 aa, synthetic construct
  REGION 1..10: note = Description of sequence: CDR3 from table 4
CALQDDKIIF

SEQ ID NO: 1732 - protein, 12 aa, synthetic construct
  REGION 1..12: note = Description of sequence: CDR3 from table 4
CATGDLGNQFYF

SEQ ID NO: 1733 - protein, 15 aa, synthetic construct
  REGION 1..15: note = Description of sequence: CDR3 from table 4
CAMRELTSGTYKYIF

SEQ ID NO: 1734 - protein, 11 aa, synthetic construct
  REGION 1..11: note = Description of sequence: CDR3 from table 4
CARNTGNQFYF

SEQ ID NO: 1735 - protein, 13 aa, synthetic construct
  REGION 1..13: note = Description of sequence: CDR3 from table 4
CAEQGGSARQLTF

SEQ ID NO: 1736 - protein, 19 aa, synthetic construct
  REGION 1..19: note = Description of sequence: CDR3 from table 4
CATDAVSGTGGTSYGKLTF

SEQ ID NO: 1737 - protein, 10 aa, synthetic construct
  REGION 1..10: note = Description of sequence: CDR3 from table 4
CVVNDNDMRF

SEQ ID NO: 1738 - protein, 13 aa, synthetic construct
  REGION 1..13: note = Description of sequence: CDR3 from table 4
CVVSPYSRVCTQL

SEQ ID NO: 1739 - protein, 10 aa, synthetic construct
  REGION 1..10: note = Description of sequence: CDR3 from table 4
CAVSEDKLSF

SEQ ID NO: 1740 - protein, 12 aa, synthetic construct
  REGION 1..12: note = Description of sequence: CDR3 from table 4
CAVSGGSYIPTF

SEQ ID NO: 1741 - protein, 11 aa, synthetic construct
  REGION 1..11: note = Description of sequence: CDR3 from table 4
CAVGSARQLTF

SEQ ID NO: 1742 - protein, 11 aa, synthetic construct
  REGION 1..11: note = Description of sequence: CDR3 from table 4
CVVTASNDMRF

SEQ ID NO: 1743 - protein, 15 aa, synthetic construct
  REGION 1..15: note = Description of sequence: CDR3 from table 4
CACADYGGSQGNLIF

SEQ ID NO: 1744 - protein, 11 aa, synthetic construct
  REGION 1..11: note = Description of sequence: CDR3 from table 4
CATNTGNQFYF

SEQ ID NO: 1745 - protein, 10 aa, synthetic construct
  REGION 1..10: note = Description of sequence: CDR3 from table 4
CAFEGGKLIF

SEQ ID NO: 1746 - protein, 11 aa, synthetic construct
  REGION 1..11: note = Description of sequence: CDR3 from table 4
CAVNNDYKLSF

SEQ ID NO: 1747 - protein, 10 aa, synthetic construct
  REGION 1..10: note = Description of sequence: CDR3 from table 4
CAVTGNQFYF

SEQ ID NO: 1748 - protein, 10 aa, synthetic construct
  REGION 1..10: note = Description of sequence: CDR3 from table 4
CAGNNARLMF

SEQ ID NO: 1749 - protein, 11 aa, synthetic construct
  REGION 1..11: note = Description of sequence: CDR3 from table 4
CALDAGNMLTF

SEQ ID NO: 1750 - protein, 10 aa, synthetic construct
  REGION 1..10: note = Description of sequence: CDR3 from table 4
CAAGDARLMF

SEQ ID NO: 1751 - protein, 11 aa, synthetic construct
  REGION 1..11: note = Description of sequence: CDR3 from table 4
CAYIWGDKIIF

SEQ ID NO: 1752 - protein, 10 aa, synthetic construct
  REGION 1..10: note = Description of sequence: CDR3 from table 4
CAVDSGDMRF

SEQ ID NO: 1753 - protein, 13 aa, synthetic construct
  REGION 1..13: note = Description of sequence: CDR3 from table 4
CAYYGGSQGNLIF

SEQ ID NO: 1754 - protein, 13 aa, synthetic construct
  REGION 1..13: note = Description of sequence: CDR3 from table 4
CAVITGGGNKLTF

SEQ ID NO: 1755 - protein, 13 aa, synthetic construct
  REGION 1..13: note = Description of sequence: CDR3 from table 4
CAVGMDSSYKLIF

SEQ ID NO: 1756 - protein, 15 aa, synthetic construct
  REGION 1..15: note = Description of sequence: CDR3 from table 4
CLVGDVQEGFQKLVF

SEQ ID NO: 1757 - protein, 10 aa, synthetic construct
  REGION 1..10: note = Description of sequence: CDR3 from table 4
CVVADDKIIF

SEQ ID NO: 1758 - protein, 10 aa, synthetic construct
  REGION 1..10: note = Description of sequence: CDR3 from table 4
CASLRNMLTF

SEQ ID NO: 1759 - protein, 14 aa, synthetic construct
  REGION 1..14: note = Description of sequence: CDR3 from table 4
CVVSVSGGYNKLIF

SEQ ID NO: 1760 - protein, 14 aa, synthetic construct
  REGION 1..14: note = Description of sequence: CDR3 from table 4
CAMRVRTWGQNFVF

SEQ ID NO: 1761 - protein, 10 aa, synthetic construct
  REGION 1..10: note = Description of sequence: CDR3 from table 4
CVVSDDKIIF

SEQ ID NO: 1762 - protein, 14 aa, synthetic construct
  REGION 1..14: note = Description of sequence: CDR3 from table 4
CAWYSGGGADGLTF

SEQ ID NO: 1763 - protein, 12 aa, synthetic construct
  REGION 1..12: note = Description of sequence: CDR3 from table 4
CAVSPFGNVLHC

SEQ ID NO: 1764 - protein, 16 aa, synthetic construct
  REGION 1..16: note = Description of sequence: CDR3 from table 4
CAVSETGAGNNRKLIW

SEQ ID NO: 1765 - protein, 10 aa, synthetic construct
  REGION 1..10: note = Description of sequence: CDR3 from table 4
CAVSDDKIIF

SEQ ID NO: 1766 - protein, 13 aa, synthetic construct
  REGION 1..13: note = Description of sequence: CDR3 from table 4
CAVRLGGADGLTF

SEQ ID NO: 1767 - protein, 16 aa, synthetic construct
  REGION 1..16: note = Description of sequence: CDR3 from table 4
CAMRSSDPGGYNKLIF

SEQ ID NO: 1768 - protein, 13 aa, synthetic construct
  REGION 1..13: note = Description of sequence: CDR3 from table 4
CVVNGGGYQKVTF

SEQ ID NO: 1769 - protein, 14 aa, synthetic construct
  REGION 1..14: note = Description of sequence: CDR3 from table 4
CAMSQDYNTDKLIF

SEQ ID NO: 1770 - protein, 10 aa, synthetic construct
  REGION 1..10: note = Description of sequence: CDR3 from table 4
CAVTNDKIIF

SEQ ID NO: 1771 - protein, 13 aa, synthetic construct
  REGION 1..13: note = Description of sequence: CDR3 from table 4
CAGASTGDYKLSF

SEQ ID NO: 1772 - protein, 12 aa, synthetic construct
  REGION 1..12: note = Description of sequence: CDR3 from table 4
CAVVGGYNKLIF

SEQ ID NO: 1773 - protein, 13 aa, synthetic construct
  REGION 1..13: note = Description of sequence: CDR3 from table 4
CDPSGGNNRKLIW

SEQ ID NO: 1774 - protein, 13 aa, synthetic construct
  REGION 1..13: note = Description of sequence: CDR3 from table 4
CAATQGGSEKLVF

SEQ ID NO: 1775 - protein, 12 aa, synthetic construct
  REGION 1..12: note = Description of sequence: CDR3 from table 4
CAYGSNNNDMRF

SEQ ID NO: 1776 - protein, 10 aa, synthetic construct
  REGION 1..10: note = Description of sequence: CDR3 from table 4
CAVNNARLMF

SEQ ID NO: 1777 - protein, 16 aa, synthetic construct
  REGION 1..16: note = Description of sequence: CDR3 from table 4
CAVGAGPGAGSYQLTF

SEQ ID NO: 1778 - protein, 16 aa, synthetic construct
  REGION 1..16: note = Description of sequence: CDR3 from table 4
CAMREGTTDSWGKLQF

SEQ ID NO: 1779 - protein, 11 aa, synthetic construct
  REGION 1..11: note = Description of sequence: CDR3 from table 4
CAVDRDDKIIF

SEQ ID NO: 1780 - protein, 15 aa, synthetic construct
  REGION 1..15: note = Description of sequence: CDR3 from table 4
CAVQAADSSASKIIF

SEQ ID NO: 1781 - protein, 15 aa, synthetic construct
  REGION 1..15: note = Description of sequence: CDR3 from table 4
CLVGGYSGGYQKVTF

SEQ ID NO: 1782 - protein, 13 aa, synthetic construct
  REGION 1..13: note = Description of sequence: CDR3 from table 4
CAVRDYGNNRLAF

SEQ ID NO: 1783 - protein, 13 aa, synthetic construct
  REGION 1..13: note = Description of sequence: CDR3 from table 4
CAGIDNAGNMLTF

SEQ ID NO: 1784 - protein, 11 aa, synthetic construct
  REGION 1..11: note = Description of sequence: CDR3 from table 4
CAAKDNRKLIW

SEQ ID NO: 1785 - protein, 13 aa, synthetic construct
  REGION 1..13: note = Description of sequence: CDR3 from table 4
CLAFSGGYNKLIF

SEQ ID NO: 1786 - protein, 13 aa, synthetic construct
  REGION 1..13: note = Description of sequence: CDR3 from table 4
CASSTDSWGKLQF

SEQ ID NO: 1787 - protein, 15 aa, synthetic construct
  REGION 1..15: note = Description of sequence: CDR3 from table 4
CALSEAGYGNNRLAF

SEQ ID NO: 1788 - protein, 11 aa, synthetic construct
  REGION 1..11: note = Description of sequence: CDR3 from table 4
CAVNYGNMLTF

SEQ ID NO: 1789 - protein, 15 aa, synthetic construct
  REGION 1..15: note = Description of sequence: CDR3 from table 4
CAMREGMDSSYKLIF

SEQ ID NO: 1790 - protein, 11 aa, synthetic construct
  REGION 1..11: note = Description of sequence: CDR3 from table 4
CAVIGSGKLIF

SEQ ID NO: 1791 - protein, 13 aa, synthetic construct
  REGION 1..13: note = Description of sequence: CDR3 from table 4
CAGASSNTGKLIF

SEQ ID NO: 1792 - protein, 12 aa, synthetic construct
  REGION 1..12: note = Description of sequence: CDR3 from table 4
CAVMADGQKLLF

SEQ ID NO: 1793 - protein, 11 aa, synthetic construct
  REGION 1..11: note = Description of sequence: CDR3 from table 4
CILSNNNDMRF

SEQ ID NO: 1794 - protein, 14 aa, synthetic construct
  REGION 1..14: note = Description of sequence: CDR3 from table 4
CAAPRETSYDKVIF

SEQ ID NO: 1795 - protein, 14 aa, synthetic construct
  REGION 1..14: note = Description of sequence: CDR3 from table 4
CAGPTKTSYDKVIF

SEQ ID NO: 1796 - protein, 16 aa, synthetic construct
  REGION 1..16: note = Description of sequence: CDR3 from table 4
CATGLNYGGSQGNLIF

SEQ ID NO: 1797 - protein, 11 aa, synthetic construct
  REGION 1..11: note = Description of sequence: CDR3 from table 4
CAVFYGNKLVF

SEQ ID NO: 1798 - protein, 14 aa, synthetic construct
  REGION 1..14: note = Description of sequence: CDR3 from table 4
CAVSDLNYGQNFVF

SEQ ID NO: 1799 - protein, 15 aa, synthetic construct
  REGION 1..15: note = Description of sequence: CDR3 from table 4
CAVNMFSNYGQNFVF

SEQ ID NO: 1800 - protein, 15 aa, synthetic construct
  REGION 1..15: note = Description of sequence: CDR3 from table 4
CALRIGGSTLGRLYF

SEQ ID NO: 1801 - protein, 15 aa, synthetic construct
  REGION 1..15: note = Description of sequence: CDR3 from table 4
CVVNLPNTGFQKLVF

SEQ ID NO: 1802 - protein, 11 aa, synthetic construct
  REGION 1..11: note = Description of sequence: CDR3 from table 4
CAVNVANDMRF

SEQ ID NO: 1803 - protein, 11 aa, synthetic construct
  REGION 1..11: note = Description of sequence: CDR3 from table 4
CAVNGGGKLTF

SEQ ID NO: 1804 - protein, 13 aa, synthetic construct
  REGION 1..13: note = Description of sequence: CDR3 from table 4
CALPNFGNEKLTF

SEQ ID NO: 1805 - protein, 14 aa, synthetic construct
  REGION 1..14: note = Description of sequence: CDR3 from table 4
CALSGSDSWGKLQF

SEQ ID NO: 1806 - protein, 12 aa, synthetic construct
  REGION 1..12: note = Description of sequence: CDR3 from table 4
CAADNYGQNFVF

SEQ ID NO: 1807 - protein, 14 aa, synthetic construct
  REGION 1..14: note = Description of sequence: CDR3 from table 4
CALSENTGFQKLVF

SEQ ID NO: 1808 - protein, 11 aa, synthetic construct
  REGION 1..11: note = Description of sequence: CDR3 from table 4
CAAPGNTPLVF

SEQ ID NO: 1809 - protein, 11 aa, synthetic construct
  REGION 1..11: note = Description of sequence: CDR3 from table 4
CAYRSVPDMRF

SEQ ID NO: 1810 - protein, 14 aa, synthetic construct
  REGION 1..14: note = Description of sequence: CDR3 from table 4
CVVNFPTNAGKSTF

SEQ ID NO: 1811 - protein, 15 aa, synthetic construct
  REGION 1..15: note = Description of sequence: CDR3 from table 4
CAYRSALWGAQKLVF

SEQ ID NO: 1812 - protein, 10 aa, synthetic construct
  REGION 1..10: note = Description of sequence: CDR3 from table 4
CAVKDARLMF

SEQ ID NO: 1813 - protein, 11 aa, synthetic construct
  REGION 1..11: note = Description of sequence: CDR3 from table 4
CSLANAGKSTF

SEQ ID NO: 1814 - protein, 13 aa, synthetic construct
  REGION 1..13: note = Description of sequence: CDR3 from table 4
CAMSDTNAGKSTF

SEQ ID NO: 1815 - protein, 13 aa, synthetic construct
  REGION 1..13: note = Description of sequence: CDR3 from table 4
CAPDQTGANNLFF

SEQ ID NO: 1816 - protein, 11 aa, synthetic construct
  REGION 1..11: note = Description of sequence: CDR3 from table 4
CAGLNNARLMF

SEQ ID NO: 1817 - protein, 15 aa, synthetic construct
  REGION 1..15: note = Description of sequence: CDR3 from table 4
CAMTLSNFGNEKLTF

SEQ ID NO: 1818 - protein, 12 aa, synthetic construct
  REGION 1..12: note = Description of sequence: CDR3 from table 4
CAVGEYGNKLVF

SEQ ID NO: 1819 - protein, 14 aa, synthetic construct
  REGION 1..14: note = Description of sequence: CDR3 from table 4
CAVQTQGGSEKLVF

SEQ ID NO: 1820 - protein, 12 aa, synthetic construct
  REGION 1..12: note = Description of sequence: CDR3 from table 4
CAARGRDDKIIF

SEQ ID NO: 1821 - protein, 13 aa, synthetic construct
  REGION 1..13: note = Description of sequence: CDR3 from table 4
CAAFTSGNTPLVF

SEQ ID NO: 1822 - protein, 14 aa, synthetic construct
  REGION 1..14: note = Description of sequence: CDR3 from table 4
CVFPNQGGSEKLVF

SEQ ID NO: 1823 - protein, 16 aa, synthetic construct
  REGION 1..16: note = Description of sequence: CDR3 from table 4
CAVSVITQGGSEKLVF

SEQ ID NO: 1824 - protein, 11 aa, synthetic construct
  REGION 1..11: note = Description of sequence: CDR3 from table 4
CAVSSYDKVIF

SEQ ID NO: 1825 - protein, 12 aa, synthetic construct
  REGION 1..12: note = Description of sequence: CDR3 from table 4
CALMDSNYQLIW

SEQ ID NO: 1826 - protein, 11 aa, synthetic construct
  REGION 1..11: note = Description of sequence: CDR3 from table 4
CAVSGYSTLTF

SEQ ID NO: 1827 - protein, 13 aa, synthetic construct
  REGION 1..13: note = Description of sequence: CDR3 from table 4
CAGSGGGYQKVTF

SEQ ID NO: 1828 - protein, 11 aa, synthetic construct
  REGION 1..11: note = Description of sequence: CDR3 from table 4
CAADSWGKLQF

SEQ ID NO: 1829 - protein, 12 aa, synthetic construct
  REGION 1..12: note = Description of sequence: CDR3 from table 4
CAAPSGNTPLVF

SEQ ID NO: 1830 - protein, 15 aa, synthetic construct
  REGION 1..15: note = Description of sequence: CDR3 from table 4
CATDGEDDSWGKLQF

SEQ ID NO: 1831 - protein, 13 aa, synthetic construct
  REGION 1..13: note = Description of sequence: CDR3 from table 4
CAVGGGSQGNLIF

SEQ ID NO: 1832 - protein, 11 aa, synthetic construct
  REGION 1..11: note = Description of sequence: CDR3 from table 4
CAVNPSNQFYF

SEQ ID NO: 1833 - protein, 14 aa, synthetic construct
  REGION 1..14: note = Description of sequence: CDR3 from table 4
CAVNLNQAGTALIF

SEQ ID NO: 1834 - protein, 14 aa, synthetic construct
  REGION 1..14: note = Description of sequence: CDR3 from table 4
CATDEVDSSYKLIF

SEQ ID NO: 1835 - protein, 15 aa, synthetic construct
  REGION 1..15: note = Description of sequence: CDR3 from table 4
CAMSQSNFGNEKLTF

SEQ ID NO: 1836 - protein, 15 aa, synthetic construct
  REGION 1..15: note = Description of sequence: CDR3 from table 4
CATGFSGAGSYQLTF

SEQ ID NO: 1837 - protein, 13 aa, synthetic construct
  REGION 1..13: note = Description of sequence: CDR3 from table 4
CAMSDGGFQKLVF

SEQ ID NO: 1838 - protein, 12 aa, synthetic construct
  REGION 1..12: note = Description of sequence: CDR3 from table 4
CAVNTGFQKLVF

SEQ ID NO: 1839 - protein, 13 aa, synthetic construct
  REGION 1..13: note = Description of sequence: CDR3 from table 4
CAVNRDNFNKFYF

SEQ ID NO: 1840 - protein, 10 aa, synthetic construct
  REGION 1..10: note = Description of sequence: CDR3 from table 4
CAVNNNDMRF

SEQ ID NO: 1841 - protein, 13 aa, synthetic construct
  REGION 1..13: note = Description of sequence: CDR3 from table 4
CAVRYSSASKIIF

SEQ ID NO: 1842 - protein, 14 aa, synthetic construct
  REGION 1..14: note = Description of sequence: CDR3 from table 4
CAAFSGGGADGLTF

SEQ ID NO: 1843 - protein, 12 aa, synthetic construct
  REGION 1..12: note = Description of sequence: CDR3 from table 4
CAVGGGYQKVTF

SEQ ID NO: 1844 - protein, 17 aa, synthetic construct
  REGION 1..17: note = Description of sequence: CDR3 from table 4
CAMSVGGLTGGGNKLTF

SEQ ID NO: 1845 - protein, 12 aa, synthetic construct
  REGION 1..12: note = Description of sequence: CDR3 from table 4
CAVANAGNMLTF

SEQ ID NO: 1846 - protein, 14 aa, synthetic construct
  REGION 1..14: note = Description of sequence: CDR3 from table 4
CAVNTGGGADGLTF

SEQ ID NO: 1847 - protein, 12 aa, synthetic construct
  REGION 1..12: note = Description of sequence: CDR3 from table 4
CAAYNAGNMLTF

SEQ ID NO: 1848 - protein, 15 aa, synthetic construct
  REGION 1..15: note = Description of sequence: CDR3 from table 4
CALSLAEGNFNKFYF

SEQ ID NO: 1849 - protein, 16 aa, synthetic construct
  REGION 1..16: note = Description of sequence: CDR3 from table 4
CAPGIAGGTSYGKLTF

SEQ ID NO: 1850 - protein, 14 aa, synthetic construct
  REGION 1..14: note = Description of sequence: CDR3 from table 4
CAVPTFVNTGKLIF

SEQ ID NO: 1851 - protein, 12 aa, synthetic construct
  REGION 1..12: note = Description of sequence: CDR3 from table 4
CAVGRDGNQFYF

SEQ ID NO: 1852 - protein, 16 aa, synthetic construct
  REGION 1..16: note = Description of sequence: CDR3 from table 4
CAVNGDSGGSNYKLTF

SEQ ID NO: 1853 - protein, 15 aa, synthetic construct
  REGION 1..15: note = Description of sequence: CDR3 from table 4
CVVSEEYTNAGKSTF

SEQ ID NO: 1854 - protein, 14 aa, synthetic construct
  REGION 1..14: note = Description of sequence: CDR3 from table 4
CAMREGTGRRALTF

SEQ ID NO: 1855 - protein, 12 aa, synthetic construct
  REGION 1..12: note = Description of sequence: CDR3 from table 4
CAGGGSQGNLIF

SEQ ID NO: 1856 - protein, 14 aa, synthetic construct
  REGION 1..14: note = Description of sequence: CDR3 from table 4
CAVPTNFGNEKLTF

SEQ ID NO: 1857 - protein, 10 aa, synthetic construct
  REGION 1..10: note = Description of sequence: CDR3 from table 4
CASTGGKLIF

SEQ ID NO: 1858 - protein, 12 aa, synthetic construct
  REGION 1..12: note = Description of sequence: CDR3 from table 4
CAVSSGTYKYIF

SEQ ID NO: 1859 - protein, 14 aa, synthetic construct
  REGION 1..14: note = Description of sequence: CDR3 from table 4
CAVRDDTGGFKTIF

SEQ ID NO: 1860 - protein, 13 aa, synthetic construct
  REGION 1..13: note = Description of sequence: CDR3 from table 4
CAFGDNYGQNFVF

SEQ ID NO: 1861 - protein, 13 aa, synthetic construct
  REGION 1..13: note = Description of sequence: CDR3 from table 4
CAGLADSNYQLIW

SEQ ID NO: 1862 - protein, 11 aa, synthetic construct
  REGION 1..11: note = Description of sequence: CDR3 from table 4
CAMDSSYKLIF

SEQ ID NO: 1863 - protein, 10 aa, synthetic construct
  REGION 1..10: note = Description of sequence: CDR3 from table 4
CAVEGSRLTF

SEQ ID NO: 1864 - protein, 13 aa, synthetic construct
  REGION 1..13: note = Description of sequence: CDR3 from table 4
CAVNPTGYSTLTF

SEQ ID NO: 1865 - protein, 13 aa, synthetic construct
  REGION 1..13: note = Description of sequence: CDR3 from table 4
CALPKGGYSTLTF

SEQ ID NO: 1866 - protein, 12 aa, synthetic construct
  REGION 1..12: note = Description of sequence: CDR3 from table 4
CALNFGNEKLTF

SEQ ID NO: 1867 - protein, 11 aa, synthetic construct
  REGION 1..11: note = Description of sequence: CDR3 from table 4
CAALTGNQFYF

SEQ ID NO: 1868 - protein, 13 aa, synthetic construct
  REGION 1..13: note = Description of sequence: CDR3 from table 4
CVVNPFGNEKLTF

SEQ ID NO: 1869 - protein, 13 aa, synthetic construct
  REGION 1..13: note = Description of sequence: CDR3 from table 4
CAGVPSNTGKLIF

SEQ ID NO: 1870 - protein, 14 aa, synthetic construct
  REGION 1..14: note = Description of sequence: CDR3 from table 4
CAASLGGGADGLTF

SEQ ID NO: 1871 - protein, 13 aa, synthetic construct
  REGION 1..13: note = Description of sequence: CDR3 from table 4
CALAIGFGNVLHC

SEQ ID NO: 1872 - protein, 15 aa, synthetic construct
  REGION 1..15: note = Description of sequence: CDR3 from table 4
CAVSFGSSNTGKLIF

SEQ ID NO: 1873 - protein, 13 aa, synthetic construct
  REGION 1..13: note = Description of sequence: CDR3 from table 4
CAASGGGADGLTF

SEQ ID NO: 1874 - protein, 11 aa, synthetic construct
  REGION 1..11: note = Description of sequence: CDR3 from table 4
CAGNTGNQFYF

SEQ ID NO: 1875 - protein, 15 aa, synthetic construct
  REGION 1..15: note = Description of sequence: CDR3 from table 4
FAGGGGSSNTGKLIF

SEQ ID NO: 1876 - protein, 12 aa, synthetic construct
  REGION 1..12: note = Description of sequence: CDR3 from table 4
CAVTGQGGKLIF

SEQ ID NO: 1877 - protein, 13 aa, synthetic construct
  REGION 1..13: note = Description of sequence: CDR3 from table 4
CAVGLGFGNVLHC

SEQ ID NO: 1878 - protein, 17 aa, synthetic construct
  REGION 1..17: note = Description of sequence: CDR3 from table 4
CAMREGPGGTSYGKLTF

SEQ ID NO: 1879 - protein, 15 aa, synthetic construct
  REGION 1..15: note = Description of sequence: CDR3 from table 4
CAGRSYNTNAGKSTF

SEQ ID NO: 1880 - protein, 10 aa, synthetic construct
  REGION 1..10: note = Description of sequence: CDR3 from table 4
CAVSTDKLIF

SEQ ID NO: 1881 - protein, 12 aa, synthetic construct
  REGION 1..12: note = Description of sequence: CDR3 from table 4
CAVSNQGGKLIF

SEQ ID NO: 1882 - protein, 14 aa, synthetic construct
  REGION 1..14: note = Description of sequence: CDR3 from table 4
CVVSAMGGGNKLTF

SEQ ID NO: 1883 - protein, 11 aa, synthetic construct
  REGION 1..11: note = Description of sequence: CDR3 from table 4
CALLDGNKLVF

SEQ ID NO: 1884 - protein, 16 aa, synthetic construct
  REGION 1..16: note = Description of sequence: CDR3 from table 4
CAVRDMHPRGYNKLIF

SEQ ID NO: 1885 - protein, 15 aa, synthetic construct
  REGION 1..15: note = Description of sequence: CDR3 from table 4
CAMRAFGADGQKLLF

SEQ ID NO: 1886 - protein, 14 aa, synthetic construct
  REGION 1..14: note = Description of sequence: CDR3 from table 4
CAPTIYNQGGKLIF

SEQ ID NO: 1887 - protein, 8 aa, synthetic construct
  REGION 1..8: note = Description of sequence: CDR3 from table 4
CAGYKLVF

SEQ ID NO: 1888 - protein, 13 aa, synthetic construct
  REGION 1..13: note = Description of sequence: CDR3 from table 4
CAGGPYNTDKLIF

SEQ ID NO: 1889 - protein, 15 aa, synthetic construct
  REGION 1..15: note = Description of sequence: CDR3 from table 4
CASSFLGTGLNEQYF

SEQ ID NO: 1890 - protein, 13 aa, synthetic construct
  REGION 1..13: note = Description of sequence: CDR3 from table 4
CAISEGAAYGYTF

SEQ ID NO: 1891 - protein, 13 aa, synthetic construct
  REGION 1..13: note = Description of sequence: CDR3 from table 4
CATSSSGAYEQYF

SEQ ID NO: 1892 - protein, 15 aa, synthetic construct
  REGION 1..15: note = Description of sequence: CDR3 from table 4
CASSFPPAGTGELFF

SEQ ID NO: 1893 - protein, 18 aa, synthetic construct
  REGION 1..18: note = Description of sequence: CDR3 from table 4
CASSPQGQGESGANVLTF

SEQ ID NO: 1894 - protein, 12 aa, synthetic construct
  REGION 1..12: note = Description of sequence: CDR3 from table 4
CASSEALYEQYF

SEQ ID NO: 1895 - protein, 13 aa, synthetic construct
  REGION 1..13: note = Description of sequence: CDR3 from table 4
CASSQGAAYEQYF

SEQ ID NO: 1896 - protein, 13 aa, synthetic construct
  REGION 1..13: note = Description of sequence: CDR3 from table 4
CASSDGVSYGYTF

SEQ ID NO: 1897 - protein, 13 aa, synthetic construct
  REGION 1..13: note = Description of sequence: CDR3 from table 4
CASSLGFGYEQFF

SEQ ID NO: 1898 - protein, 13 aa, synthetic construct
  REGION 1..13: note = Description of sequence: CDR3 from table 4
CSARSGVGNTIYF

SEQ ID NO: 1899 - protein, 15 aa, synthetic construct
  REGION 1..15: note = Description of sequence: CDR3 from table 4
CSPLGGQGVWDEQFF

SEQ ID NO: 1900 - protein, 15 aa, synthetic construct
  REGION 1..15: note = Description of sequence: CDR3 from table 4
CAISEPGTGDTEAFF

SEQ ID NO: 1901 - protein, 15 aa, synthetic construct
  REGION 1..15: note = Description of sequence: CDR3 from table 4
CASSIYGAGYTEAFF

SEQ ID NO: 1902 - protein, 13 aa, synthetic construct
  REGION 1..13: note = Description of sequence: CDR3 from table 4
CASSFGASYGYTF

SEQ ID NO: 1903 - protein, 17 aa, synthetic construct
  REGION 1..17: note = Description of sequence: CDR3 from table 4
CATSVGSGPLSTDTQYF

SEQ ID NO: 1904 - protein, 15 aa, synthetic construct
  REGION 1..15: note = Description of sequence: CDR3 from table 4
CASSQETSPNYGYTF

SEQ ID NO: 1905 - protein, 16 aa, synthetic construct
  REGION 1..16: note = Description of sequence: CDR3 from table 4
CASSPTTRTRYYGYTF

SEQ ID NO: 1906 - protein, 14 aa, synthetic construct
  REGION 1..14: note = Description of sequence: CDR3 from table 4
CSAIGPRGTDTQYF

SEQ ID NO: 1907 - protein, 16 aa, synthetic construct
  REGION 1..16: note = Description of sequence: CDR3 from table 4
CASSQEMASVQETQYF

SEQ ID NO: 1908 - protein, 15 aa, synthetic construct
  REGION 1..15: note = Description of sequence: CDR3 from table 4
CASSLGGQGAYEQYF

SEQ ID NO: 1909 - protein, 13 aa, synthetic construct
  REGION 1..13: note = Description of sequence: CDR3 from table 4
CATSPRGGHEQYF

SEQ ID NO: 1910 - protein, 12 aa, synthetic construct
  REGION 1..12: note = Description of sequence: CDR3 from table 4
CASLGLEYEQYF

SEQ ID NO: 1911 - protein, 15 aa, synthetic construct
  REGION 1..15: note = Description of sequence: CDR3 from table 4
CASSATGVSPYEQYF

SEQ ID NO: 1912 - protein, 13 aa, synthetic construct
  REGION 1..13: note = Description of sequence: CDR3 from table 4
CASSQGLSYEQYF

SEQ ID NO: 1913 - protein, 13 aa, synthetic construct
  REGION 1..13: note = Description of sequence: CDR3 from table 4
CASSVAGSTEAFF

SEQ ID NO: 1914 - protein, 9 aa, synthetic construct
  REGION 1..9: note = Description of sequence: CDR3 from table 4
CASNQPQHF

SEQ ID NO: 1915 - protein, 15 aa, synthetic construct
  REGION 1..15: note = Description of sequence: CDR3 from table 4
CSARDPSQGGYEQYF

SEQ ID NO: 1916 - protein, 14 aa, synthetic construct
  REGION 1..14: note = Description of sequence: CDR3 from table 4
CASSVDGGSQPQHF

SEQ ID NO: 1917 - protein, 15 aa, synthetic construct
  REGION 1..15: note = Description of sequence: CDR3 from table 4
CASSLPAGVGDTQYF

SEQ ID NO: 1918 - protein, 13 aa, synthetic construct
  REGION 1..13: note = Description of sequence: CDR3 from table 4
CASSIGLNQPQHF

SEQ ID NO: 1919 - protein, 15 aa, synthetic construct
  REGION 1..15: note = Description of sequence: CDR3 from table 4
CASSVGGVPYNEQFF

SEQ ID NO: 1920 - protein, 12 aa, synthetic construct
  REGION 1..12: note = Description of sequence: CDR3 from table 4
CASSLVESEQFF

SEQ ID NO: 1921 - protein, 12 aa, synthetic construct
  REGION 1..12: note = Description of sequence: CDR3 from table 4
CASSFANSPLHF

SEQ ID NO: 1922 - protein, 16 aa, synthetic construct
  REGION 1..16: note = Description of sequence: CDR3 from table 4
CASSLTALGAAYVYTF

SEQ ID NO: 1923 - protein, 11 aa, synthetic construct
  REGION 1..11: note = Description of sequence: CDR3 from table 4
CSATEGSGYTF

SEQ ID NO: 1924 - protein, 14 aa, synthetic construct
  REGION 1..14: note = Description of sequence: CDR3 from table 4
CASSRRDSNTEAFF

SEQ ID NO: 1925 - protein, 13 aa, synthetic construct
  REGION 1..13: note = Description of sequence: CDR3 from table 4
CASSFWGADTQYF

SEQ ID NO: 1926 - protein, 12 aa, synthetic construct
  REGION 1..12: note = Description of sequence: CDR3 from table 4
CASTGQNPEAFF

SEQ ID NO: 1927 - protein, 16 aa, synthetic construct
  REGION 1..16: note = Description of sequence: CDR3 from table 4
CASSEVRGPWAETQYF

SEQ ID NO: 1928 - protein, 15 aa, synthetic construct
  REGION 1..15: note = Description of sequence: CDR3 from table 4
CATSRTGTGSTEAFF

SEQ ID NO: 1929 - protein, 15 aa, synthetic construct
  REGION 1..15: note = Description of sequence: CDR3 from table 4
CASSPTGTGYNEQFF

SEQ ID NO: 1930 - protein, 11 aa, synthetic construct
  REGION 1..11: note = Description of sequence: CDR3 from table 4
CSAWWGAEQYF

SEQ ID NO: 1931 - protein, 15 aa, synthetic construct
  REGION 1..15: note = Description of sequence: CDR3 from table 4
CASSIQGRGDTEAFF

SEQ ID NO: 1932 - protein, 13 aa, synthetic construct
  REGION 1..13: note = Description of sequence: CDR3 from table 4
CASSAGLFPEQFF

SEQ ID NO: 1933 - protein, 11 aa, synthetic construct
  REGION 1..11: note = Description of sequence: CDR3 from table 4
CASRTRQEAFF

SEQ ID NO: 1934 - protein, 13 aa, synthetic construct
  REGION 1..13: note = Description of sequence: CDR3 from table 4
CASSIVGNTEAFF

SEQ ID NO: 1935 - protein, 13 aa, synthetic construct
  REGION 1..13: note = Description of sequence: CDR3 from table 4
CASSFWGLGELFF

SEQ ID NO: 1936 - protein, 11 aa, synthetic construct
  REGION 1..11: note = Description of sequence: CDR3 from table 4
CASSPMNEQFF

SEQ ID NO: 1937 - protein, 13 aa, synthetic construct
  REGION 1..13: note = Description of sequence: CDR3 from table 4
CASGRGPNYGYTF

SEQ ID NO: 1938 - protein, 15 aa, synthetic construct
  REGION 1..15: note = Description of sequence: CDR3 from table 4
CASSLLGLIKETQYF

SEQ ID NO: 1939 - protein, 11 aa, synthetic construct
  REGION 1..11: note = Description of sequence: CDR3 from table 4
CASSDSYEQYF

SEQ ID NO: 1940 - protein, 14 aa, synthetic construct
  REGION 1..14: note = Description of sequence: CDR3 from table 4
CASSPGQVSYEQYF

SEQ ID NO: 1941 - protein, 13 aa, synthetic construct
  REGION 1..13: note = Description of sequence: CDR3 from table 4
CASSLAGGGEQYF

SEQ ID NO: 1942 - protein, 15 aa, synthetic construct
  REGION 1..15: note = Description of sequence: CDR3 from table 4
CASSVYSGGYNEQFF

SEQ ID NO: 1943 - protein, 14 aa, synthetic construct
  REGION 1..14: note = Description of sequence: CDR3 from table 4
CASSVGVGTDTQYF

SEQ ID NO: 1944 - protein, 13 aa, synthetic construct
  REGION 1..13: note = Description of sequence: CDR3 from table 4
CSVDNKAGGGYTF

SEQ ID NO: 1945 - protein, 15 aa, synthetic construct
  REGION 1..15: note = Description of sequence: CDR3 from table 4
CASSYSPGTGNTIYF

SEQ ID NO: 1946 - protein, 16 aa, synthetic construct
  REGION 1..16: note = Description of sequence: CDR3 from table 4
CASSEGPGQGSYEQYF

SEQ ID NO: 1947 - protein, 16 aa, synthetic construct
  REGION 1..16: note = Description of sequence: CDR3 from table 4
CASSEAFGRPNYGYTF

SEQ ID NO: 1948 - protein, 13 aa, synthetic construct
  REGION 1..13: note = Description of sequence: CDR3 from table 4
CASRSHPTYEQYF

SEQ ID NO: 1949 - protein, 14 aa, synthetic construct
  REGION 1..14: note = Description of sequence: CDR3 from table 4
CSARDLGLHQPQHF

SEQ ID NO: 1950 - protein, 16 aa, synthetic construct
  REGION 1..16: note = Description of sequence: CDR3 from table 4
CASSFDLAGVNYEQYF

SEQ ID NO: 1951 - protein, 19 aa, synthetic construct
  REGION 1..19: note = Description of sequence: CDR3 from table 4
CASSPLRGPADRTGTEAFF

SEQ ID NO: 1952 - protein, 15 aa, synthetic construct
  REGION 1..15: note = Description of sequence: CDR3 from table 4
CASSFWAGGWTEAFF

SEQ ID NO: 1953 - protein, 13 aa, synthetic construct
  REGION 1..13: note = Description of sequence: CDR3 from table 4
CASSYGSNYGYTF

SEQ ID NO: 1954 - protein, 13 aa, synthetic construct
  REGION 1..13: note = Description of sequence: CDR3 from table 4
CATRGGEGQPQHF

SEQ ID NO: 1955 - protein, 14 aa, synthetic construct
  REGION 1..14: note = Description of sequence: CDR3 from table 4
CASSLGDWDLEAFF

SEQ ID NO: 1956 - protein, 13 aa, synthetic construct
  REGION 1..13: note = Description of sequence: CDR3 from table 4
CASGPGTAYGYTF

SEQ ID NO: 1957 - protein, 14 aa, synthetic construct
  REGION 1..14: note = Description of sequence: CDR3 from table 4
CASSLGPAYNEQFF

SEQ ID NO: 1958 - protein, 16 aa, synthetic construct
  REGION 1..16: note = Description of sequence: CDR3 from table 4
CASSHDAGASTGELFF

SEQ ID NO: 1959 - protein, 13 aa, synthetic construct
  REGION 1..13: note = Description of sequence: CDR3 from table 4
CASSSGAAYEQYF

SEQ ID NO: 1960 - protein, 19 aa, synthetic construct
  REGION 1..19: note = Description of sequence: CDR3 from table 4
CASSESFPASGGSTDTQYF

SEQ ID NO: 1961 - protein, 16 aa, synthetic construct
  REGION 1..16: note = Description of sequence: CDR3 from table 4
CASSYATEVAGETQYF

SEQ ID NO: 1962 - protein, 12 aa, synthetic construct
  REGION 1..12: note = Description of sequence: CDR3 from table 4
CASMTNNQPQHF

SEQ ID NO: 1963 - protein, 14 aa, synthetic construct
  REGION 1..14: note = Description of sequence: CDR3 from table 4
CASSQTAGGYEQYF

SEQ ID NO: 1964 - protein, 15 aa, synthetic construct
  REGION 1..15: note = Description of sequence: CDR3 from table 4
CASSVGGVSYNEQFF

SEQ ID NO: 1965 - protein, 14 aa, synthetic construct
  REGION 1..14: note = Description of sequence: CDR3 from table 4
CASSQVSSTGELFF

SEQ ID NO: 1966 - protein, 17 aa, synthetic construct
  REGION 1..17: note = Description of sequence: CDR3 from table 4
CASSQTIGTGFSNEQFF

SEQ ID NO: 1967 - protein, 15 aa, synthetic construct
  REGION 1..15: note = Description of sequence: CDR3 from table 4
CAWSISDSSRVEAFF

SEQ ID NO: 1968 - protein, 12 aa, synthetic construct
  REGION 1..12: note = Description of sequence: CDR3 from table 4
CASSSANYGYTF

SEQ ID NO: 1969 - protein, 13 aa, synthetic construct
  REGION 1..13: note = Description of sequence: CDR3 from table 4
CASSLFNQETQYF

SEQ ID NO: 1970 - protein, 15 aa, synthetic construct
  REGION 1..15: note = Description of sequence: CDR3 from table 4
CASSYATGIPDTQYF

SEQ ID NO: 1971 - protein, 15 aa, synthetic construct
  REGION 1..15: note = Description of sequence: CDR3 from table 4
CASTYGGGALNEQFF

SEQ ID NO: 1972 - protein, 15 aa, synthetic construct
  REGION 1..15: note = Description of sequence: CDR3 from table 4
CASSASGGRDYGYTF

SEQ ID NO: 1973 - protein, 19 aa, synthetic construct
  REGION 1..19: note = Description of sequence: CDR3 from table 4
CASRTGTSGGFPNTGELFF

SEQ ID NO: 1974 - protein, 14 aa, synthetic construct
  REGION 1..14: note = Description of sequence: CDR3 from table 4
CASSYSIGNTEAFF

SEQ ID NO: 1975 - protein, 11 aa, synthetic construct
  REGION 1..11: note = Description of sequence: CDR3 from table 4
CATSGSYEQYF

SEQ ID NO: 1976 - protein, 13 aa, synthetic construct
  REGION 1..13: note = Description of sequence: CDR3 from table 4
CASSYRFDSPLHF

SEQ ID NO: 1977 - protein, 17 aa, synthetic construct
  REGION 1..17: note = Description of sequence: CDR3 from table 4
CASSESTIVQGYNEQFF

SEQ ID NO: 1978 - protein, 14 aa, synthetic construct
  REGION 1..14: note = Description of sequence: CDR3 from table 4
CAWSVSGLGYGYTF

SEQ ID NO: 1979 - protein, 14 aa, synthetic construct
  REGION 1..14: note = Description of sequence: CDR3 from table 4
CAISETTGINEQFF

SEQ ID NO: 1980 - protein, 13 aa, synthetic construct
  REGION 1..13: note = Description of sequence: CDR3 from table 4
CAWSGFSRTEAFF

SEQ ID NO: 1981 - protein, 15 aa, synthetic construct
  REGION 1..15: note = Description of sequence: CDR3 from table 4
CASSLGQGLSYEQYF

SEQ ID NO: 1982 - protein, 15 aa, synthetic construct
  REGION 1..15: note = Description of sequence: CDR3 from table 4
CASSLAENSGNTIYF

SEQ ID NO: 1983 - protein, 15 aa, synthetic construct
  REGION 1..15: note = Description of sequence: CDR3 from table 4
CASSLVGGITGELFF

SEQ ID NO: 1984 - protein, 16 aa, synthetic construct
  REGION 1..16: note = Description of sequence: CDR3 from table 4
CASSTSAGFSNQPQHF

SEQ ID NO: 1985 - protein, 15 aa, synthetic construct
  REGION 1..15: note = Description of sequence: CDR3 from table 4
CASSLQGGYGGGYTF

SEQ ID NO: 1986 - protein, 13 aa, synthetic construct
  REGION 1..13: note = Description of sequence: CDR3 from table 4
CASSDMAGDGYTF

SEQ ID NO: 1987 - protein, 12 aa, synthetic construct
  REGION 1..12: note = Description of sequence: CDR3 from table 4
CASSPGPYEQYF

SEQ ID NO: 1988 - protein, 14 aa, synthetic construct
  REGION 1..14: note = Description of sequence: CDR3 from table 4
CASSLGGLGQPQHF

SEQ ID NO: 1989 - protein, 13 aa, synthetic construct
  REGION 1..13: note = Description of sequence: CDR3 from table 4
CASSWAPHYEQYF

SEQ ID NO: 1990 - protein, 15 aa, synthetic construct
  REGION 1..15: note = Description of sequence: CDR3 from table 4
CASSQDPGNGNTIYF

SEQ ID NO: 1991 - protein, 12 aa, synthetic construct
  REGION 1..12: note = Description of sequence: CDR3 from table 4
CASSAGRYEQYF

SEQ ID NO: 1992 - protein, 15 aa, synthetic construct
  REGION 1..15: note = Description of sequence: CDR3 from table 4
CASSVGGFGNQPQHF

SEQ ID NO: 1993 - protein, 16 aa, synthetic construct
  REGION 1..16: note = Description of sequence: CDR3 from table 4
CATSTGWRTGTDTQYF

SEQ ID NO: 1994 - protein, 12 aa, synthetic construct
  REGION 1..12: note = Description of sequence: CDR3 from table 4
CSALTGNQPQHF

SEQ ID NO: 1995 - protein, 14 aa, synthetic construct
  REGION 1..14: note = Description of sequence: CDR3 from table 4
CSVGLGQTGTEAFF

SEQ ID NO: 1996 - protein, 16 aa, synthetic construct
  REGION 1..16: note = Description of sequence: CDR3 from table 4
CASSYSQGVYTGELFF

SEQ ID NO: 1997 - protein, 12 aa, synthetic construct
  REGION 1..12: note = Description of sequence: CDR3 from table 4
CASSWDYTEQYF

SEQ ID NO: 1998 - protein, 14 aa, synthetic construct
  REGION 1..14: note = Description of sequence: CDR3 from table 4
CATSDSTGSYGYTF

SEQ ID NO: 1999 - protein, 13 aa, synthetic construct
  REGION 1..13: note = Description of sequence: CDR3 from table 4
CASLQGSGSPLHF

SEQ ID NO: 2000 - protein, 14 aa, synthetic construct
  REGION 1..14: note = Description of sequence: CDR3 from table 4
CASSVGGLGQPQHF

SEQ ID NO: 2001 - protein, 11 aa, synthetic construct
  REGION 1..11: note = Description of sequence: CDR3 from table 4
CASSMAGEQYF

SEQ ID NO: 2002 - protein, 15 aa, synthetic construct
  REGION 1..15: note = Description of sequence: CDR3 from table 4
CASVLGGSSYNEQFF

SEQ ID NO: 2003 - protein, 14 aa, synthetic construct
  REGION 1..14: note = Description of sequence: CDR3 from table 4
CASSPYRTGNIQYF

SEQ ID NO: 2004 - protein, 13 aa, synthetic construct
  REGION 1..13: note = Description of sequence: CDR3 from table 4
CASRGPYHNEQFF

SEQ ID NO: 2005 - protein, 13 aa, synthetic construct
  REGION 1..13: note = Description of sequence: CDR3 from table 4
CASSQVGSTEAFF

SEQ ID NO: 2006 - protein, 11 aa, synthetic construct
  REGION 1..11: note = Description of sequence: CDR3 from table 4
CASTSYTEAFF

SEQ ID NO: 2007 - protein, 16 aa, synthetic construct
  REGION 1..16: note = Description of sequence: CDR3 from table 4
CASSPGQSPTNEKLFF

SEQ ID NO: 2008 - protein, 14 aa, synthetic construct
  REGION 1..14: note = Description of sequence: CDR3 from table 4
CASSLVMDNYGYTF

SEQ ID NO: 2009 - protein, 13 aa, synthetic construct
  REGION 1..13: note = Description of sequence: CDR3 from table 4
CASSSPGGETQYF

SEQ ID NO: 2010 - protein, 14 aa, synthetic construct
  REGION 1..14: note = Description of sequence: CDR3 from table 4
CASSPEPGSHEQYF

SEQ ID NO: 2011 - protein, 12 aa, synthetic construct
  REGION 1..12: note = Description of sequence: CDR3 from table 4
CASRPGGGGYTF

SEQ ID NO: 2012 - protein, 14 aa, synthetic construct
  REGION 1..14: note = Description of sequence: CDR3 from table 4
CASMRGAHTGELFF

SEQ ID NO: 2013 - protein, 12 aa, synthetic construct
  REGION 1..12: note = Description of sequence: CDR3 from table 4
CSASTGLTEAFF

SEQ ID NO: 2014 - protein, 17 aa, synthetic construct
  REGION 1..17: note = Description of sequence: CDR3 from table 4
CASSLVRDLLFTDTQYF

SEQ ID NO: 2015 - protein, 17 aa, synthetic construct
  REGION 1..17: note = Description of sequence: CDR3 from table 4
CASSLSGQGATNEKLFF

SEQ ID NO: 2016 - protein, 16 aa, synthetic construct
  REGION 1..16: note = Description of sequence: CDR3 from table 4
CASSQEVGLAGETQYF

SEQ ID NO: 2017 - protein, 13 aa, synthetic construct
  REGION 1..13: note = Description of sequence: CDR3 from table 4
CASTQGDTGELFF

SEQ ID NO: 2018 - protein, 14 aa, synthetic construct
  REGION 1..14: note = Description of sequence: CDR3 from table 4
CASSSDRAGSPLHF

SEQ ID NO: 2019 - protein, 14 aa, synthetic construct
  REGION 1..14: note = Description of sequence: CDR3 from table 4
CASSHRGSGNTIYF

SEQ ID NO: 2020 - protein, 18 aa, synthetic construct
  REGION 1..18: note = Description of sequence: CDR3 from table 4
CASSLADVGQYDTDTQYF

SEQ ID NO: 2021 - protein, 13 aa, synthetic construct
  REGION 1..13: note = Description of sequence: CDR3 from table 4
CASSGPARDTQYF

SEQ ID NO: 2022 - protein, 11 aa, synthetic construct
  REGION 1..11: note = Description of sequence: CDR3 from table 4
CASTWTGEQYF

SEQ ID NO: 2023 - protein, 13 aa, synthetic construct
  REGION 1..13: note = Description of sequence: CDR3 from table 4
CASSLAYSYEQYF

SEQ ID NO: 2024 - protein, 15 aa, synthetic construct
  REGION 1..15: note = Description of sequence: CDR3 from table 4
CASSYETGGSYEQYF

SEQ ID NO: 2025 - protein, 13 aa, synthetic construct
  REGION 1..13: note = Description of sequence: CDR3 from table 4
CASTYGGLNEQYF

SEQ ID NO: 2026 - protein, 15 aa, synthetic construct
  REGION 1..15: note = Description of sequence: CDR3 from table 4
CASSTTGGGNYEQYF

SEQ ID NO: 2027 - protein, 13 aa, synthetic construct
  REGION 1..13: note = Description of sequence: CDR3 from table 4
CASSLWGAGELFF

SEQ ID NO: 2028 - protein, 12 aa, synthetic construct
  REGION 1..12: note = Description of sequence: CDR3 from table 4
CASNGGSYEQYF

SEQ ID NO: 2029 - protein, 12 aa, synthetic construct
  REGION 1..12: note = Description of sequence: CDR3 from table 4
CASSLGDTEQFF

SEQ ID NO: 2030 - protein, 16 aa, synthetic construct
  REGION 1..16: note = Description of sequence: CDR3 from table 4
CASSLERLRVYSGYTF

SEQ ID NO: 2031 - protein, 14 aa, synthetic construct
  REGION 1..14: note = Description of sequence: CDR3 from table 4
CATHGVSSRETQYF

SEQ ID NO: 2032 - protein, 16 aa, synthetic construct
  REGION 1..16: note = Description of sequence: CDR3 from table 4
CASSLEGTGLTDTQYF

SEQ ID NO: 2033 - protein, 15 aa, synthetic construct
  REGION 1..15: note = Description of sequence: CDR3 from table 4
CASSLSTVFTDTQYF

SEQ ID NO: 2034 - protein, 13 aa, synthetic construct
  REGION 1..13: note = Description of sequence: CDR3 from table 4
CASSLLGNTEAFF

SEQ ID NO: 2035 - protein, 13 aa, synthetic construct
  REGION 1..13: note = Description of sequence: CDR3 from table 4
CASSTTEAYEQYF

SEQ ID NO: 2036 - protein, 15 aa, synthetic construct
  REGION 1..15: note = Description of sequence: CDR3 from table 4
CASSTALAASYEQYF

SEQ ID NO: 2037 - protein, 13 aa, synthetic construct
  REGION 1..13: note = Description of sequence: CDR3 from table 4
CASSLGVGQPQHF

SEQ ID NO: 2038 - protein, 19 aa, synthetic construct
  REGION 1..19: note = Description of sequence: CDR3 from table 4
CASSVGSGGRPSSYNEQFF

SEQ ID NO: 2039 - protein, 16 aa, synthetic construct
  REGION 1..16: note = Description of sequence: CDR3 from table 4
CASSALAGGQADTQYF

SEQ ID NO: 2040 - protein, 15 aa, synthetic construct
  REGION 1..15: note = Description of sequence: CDR3 from table 4
CASSSGPTMGGKLFF

SEQ ID NO: 2041 - protein, 13 aa, synthetic construct
  REGION 1..13: note = Description of sequence: CDR3 from table 4
CASNSGGYNEQFF

SEQ ID NO: 2042 - protein, 15 aa, synthetic construct
  REGION 1..15: note = Description of sequence: CDR3 from table 4
CASSTTGTGLLEQYF

SEQ ID NO: 2043 - protein, 14 aa, synthetic construct
  REGION 1..14: note = Description of sequence: CDR3 from table 4
CASSSGPRGNEQFF

SEQ ID NO: 2044 - protein, 13 aa, synthetic construct
  REGION 1..13: note = Description of sequence: CDR3 from table 4
CASSQGSGQPQHF

SEQ ID NO: 2045 - protein, 15 aa, synthetic construct
  REGION 1..15: note = Description of sequence: CDR3 from table 4
CSARHPGVSTDTQYF

SEQ ID NO: 2046 - protein, 16 aa, synthetic construct
  REGION 1..16: note = Description of sequence: CDR3 from table 4
CASSPWRGPFQETQYF

SEQ ID NO: 2047 - protein, 12 aa, synthetic construct
  REGION 1..12: note = Description of sequence: CDR3 from table 4
CASSPGKTEAFF

SEQ ID NO: 2048 - protein, 13 aa, synthetic construct
  REGION 1..13: note = Description of sequence: CDR3 from table 4
CASSESGRAEAFF

SEQ ID NO: 2049 - protein, 14 aa, synthetic construct
  REGION 1..14: note = Description of sequence: CDR3 from table 4
CASSPDVGHEKLFF

SEQ ID NO: 2050 - protein, 15 aa, synthetic construct
  REGION 1..15: note = Description of sequence: CDR3 from table 4
CASSPIGGGSNEQFF

SEQ ID NO: 2051 - protein, 15 aa, synthetic construct
  REGION 1..15: note = Description of sequence: CDR3 from table 4
CASGFTFQGSPEAFF

SEQ ID NO: 2052 - protein, 15 aa, synthetic construct
  REGION 1..15: note = Description of sequence: CDR3 from table 4
CASSFGGLARNEQFF

SEQ ID NO: 2053 - protein, 15 aa, synthetic construct
  REGION 1..15: note = Description of sequence: CDR3 from table 4
CASSYFGGSLSEQYF

SEQ ID NO: 2054 - protein, 14 aa, synthetic construct
  REGION 1..14: note = Description of sequence: CDR3 from table 4
CASSFLTGTGELFF

SEQ ID NO: 2055 - protein, 14 aa, synthetic construct
  REGION 1..14: note = Description of sequence: CDR3 from table 4
CASRPQGLGNTIYF

SEQ ID NO: 2056 - protein, 15 aa, synthetic construct
  REGION 1..15: note = Description of sequence: CDR3 from table 4
CASSYFRGSLSEQYF

SEQ ID NO: 2057 - protein, 12 aa, synthetic construct
  REGION 1..12: note = Description of sequence: CDR3 from table 4
CASSPGGTEAFF

SEQ ID NO: 2058 - protein, 14 aa, synthetic construct
  REGION 1..14: note = Description of sequence: CDR3 from table 4
CASSFGGGGQPQHF

SEQ ID NO: 2059 - protein, 13 aa, synthetic construct
  REGION 1..13: note = Description of sequence: CDR3 from table 4
CASSLGVGTEAFF

SEQ ID NO: 2060 - protein, 17 aa, synthetic construct
  REGION 1..17: note = Description of sequence: CDR3 from table 4
CASSFGRNRSQNTEAFF

SEQ ID NO: 2061 - protein, 15 aa, synthetic construct
  REGION 1..15: note = Description of sequence: CDR3 from table 4
CASSYRQDSNQPQHF

SEQ ID NO: 2062 - protein, 9 aa, synthetic construct
  REGION 1..9: note = Description of sequence: Wildtype peptide from Table 5
FLTYLDVSV

SEQ ID NO: 2063 - protein, 9 aa, synthetic construct
  REGION 1..9: note = Description of sequence: Wildtype peptide from Table 5
SMPDFDLHL

SEQ ID NO: 2064 - protein, 10 aa, synthetic construct
  REGION 1..10: note = Description of sequence: Wildtype peptide from Table 5
VLLGVKLSGV

SEQ ID NO: 2065 - protein, 9 aa, synthetic construct
  REGION 1..9: note = Description of sequence: Wildtype peptide from Table 5
ALIHHNTHL

SEQ ID NO: 2066 - protein, 10 aa, synthetic construct
  REGION 1..10: note = Description of sequence: Wildtype peptide from Table 5
VLENFTILLV

SEQ ID NO: 2067 - protein, 10 aa, synthetic construct
  REGION 1..10: note = Description of sequence: Wildtype peptide from Table 5
SVLENFTILL

SEQ ID NO: 2068 - protein, 9 aa, synthetic construct
  REGION 1..9: note = Description of sequence: Wildtype peptide from Table 5
ILTGLNYEA

SEQ ID NO: 2069 - protein, 9 aa, synthetic construct
  REGION 1..9: note = Description of sequence: Wildtype peptide from Table 5
ALYGSVPVL

SEQ ID NO: 2070 - protein, 9 aa, synthetic construct
  REGION 1..9: note = Description of sequence: Wildtype peptide from Table 5
VVLSWAPPV

SEQ ID NO: 2071 - protein, 10 aa, synthetic construct
  REGION 1..10: note = Description of sequence: Wildtype peptide from Table 5
ALLETLSLLL

SEQ ID NO: 2072 - protein, 9 aa, synthetic construct
  REGION 1..9: note = Description of sequence: Wildtype peptide from Table 5
ALSPVIPLI

SEQ ID NO: 2073 - protein, 10 aa, synthetic construct
  REGION 1..10: note = Description of sequence: Wildtype peptide from Table 5
KLFEFLVHGV

SEQ ID NO: 2074 - protein, 9 aa, synthetic construct
  REGION 1..9: note = Description of sequence: Wildtype peptide from Table 5
NLNRCSVPV

SEQ ID NO: 2075 - protein, 9 aa, synthetic construct
  REGION 1..9: note = Description of sequence: Wildtype peptide from Table 5
LIIPCIHLI

SEQ ID NO: 2076 - protein, 9 aa, synthetic construct
  REGION 1..9: note = Description of sequence: Wildtype peptide from Table 5
LLFGMTPCL

SEQ ID NO: 2077 - protein, 9 aa, synthetic construct
  REGION 1..9: note = Description of sequence: Wildtype peptide from Table 5
KLSHQPVLL

SEQ ID NO: 2078 - protein, 9 aa, synthetic construct
  REGION 1..9: note = Description of sequence: Wildtype peptide from Table 5
AVGSHVYSV

SEQ ID NO: 2079 - protein, 9 aa, synthetic construct
  REGION 1..9: note = Description of sequence: Wildtype peptide from Table 5
FLYNPLTRV

SEQ ID NO: 2080 - protein, 9 aa, synthetic construct
  REGION 1..9: note = Description of sequence: Wildtype peptide from Table 5
KLMNIQQQL

SEQ ID NO: 2081 - protein, 9 aa, synthetic construct
  REGION 1..9: note = Description of sequence: Wildtype peptide from Table 5
MLGERLFPL

SEQ ID NO: 2082 - protein, 9 aa, synthetic construct
  REGION 1..9: note = Description of sequence: Mutant peptide from Table 5
FLIYLDVSV

SEQ ID NO: 2083 - protein, 9 aa, synthetic construct
  REGION 1..9: note = Description of sequence: Mutant peptide from Table 5
FMPDFDLHL

SEQ ID NO: 2084 - protein, 10 aa, synthetic construct
  REGION 1..10: note = Description of sequence: Mutant peptide from Table 5
VLLGVKLFGV

SEQ ID NO: 2085 - protein, 9 aa, synthetic construct
  REGION 1..9: note = Description of sequence: Mutant peptide from Table 5
ALIHHNTYL

SEQ ID NO: 2086 - protein, 10 aa, synthetic construct
  REGION 1..10: note = Description of sequence: Mutant peptide from Table 5
VLENFTIFLV

SEQ ID NO: 2087 - protein, 10 aa, synthetic construct
  REGION 1..10: note = Description of sequence: Mutant peptide from Table 5
SVLENFTIFL

SEQ ID NO: 2088 - protein, 9 aa, synthetic construct
  REGION 1..9: note = Description of sequence: Mutant peptide from Table 5
ILTGLNYEV

SEQ ID NO: 2089 - protein, 9 aa, synthetic construct
  REGION 1..9: note = Description of sequence: Mutant peptide from Table 5
ALYGFVPVL

SEQ ID NO: 2090 - protein, 9 aa, synthetic construct
  REGION 1..9: note = Description of sequence: Mutant peptide from Table 5
VVMSWAPPV

SEQ ID NO: 2091 - protein, 10 aa, synthetic construct
  REGION 1..10: note = Description of sequence: Mutant peptide from Table 5
ALLETPSLLL

SEQ ID NO: 2092 - protein, 9 aa, synthetic construct
  REGION 1..9: note = Description of sequence: Mutant peptide from Table 5
ALSPVIPHI

SEQ ID NO: 2093 - protein, 10 aa, synthetic construct
  REGION 1..10: note = Description of sequence: Mutant peptide from Table 5
KLFEFLVYGV

SEQ ID NO: 2094 - protein, 9 aa, synthetic construct
  REGION 1..9: note = Description of sequence: Mutant peptide from Table 5
NLNCCSVPV

SEQ ID NO: 2095 - protein, 9 aa, synthetic construct
  REGION 1..9: note = Description of sequence: Mutant peptide from Table 5
LIIPFIHLI

SEQ ID NO: 2096 - protein, 9 aa, synthetic construct
  REGION 1..9: note = Description of sequence: Mutant peptide from Table 5
LLFGMPPCL

SEQ ID NO: 2097 - protein, 9 aa, synthetic construct
  REGION 1..9: note = Description of sequence: Mutant peptide from Table 5
KLSHQLVLL

SEQ ID NO: 2098 - protein, 9 aa, synthetic construct
  REGION 1..9: note = Description of sequence: Mutant peptide from Table 5
AVGSYVYSV

SEQ ID NO: 2099 - protein, 9 aa, synthetic construct
  REGION 1..9: note = Description of sequence: Mutant peptide from Table 5
FLYNLLTRV

SEQ ID NO: 2100 - protein, 9 aa, synthetic construct
  REGION 1..9: note = Description of sequence: Mutant peptide from Table 5
KLMNIQQKL

SEQ ID NO: 2101 - protein, 9 aa, synthetic construct
  REGION 1..9: note = Description of sequence: Mutant peptide from Table 5
MLGEQLFPL

SEQ ID NO: 2102 - protein, 15 aa, synthetic construct
  REGION 1..15: note = Description of sequence: CDR3 from Table 6
CAMRESNTGGFKTIF

SEQ ID NO: 2103 - protein, 11 aa, synthetic construct
  REGION 1..11: note = Description of sequence: CDR3 from Table 6
CAVYNTDKLIF

SEQ ID NO: 2104 - protein, 10 aa, synthetic construct
  REGION 1..10: note = Description of sequence: CDR3 from Table 6
GGTSYGKLTF

SEQ ID NO: 2105 - protein, 13 aa, synthetic construct
  REGION 1..13: note = Description of sequence: CDR3 from Table 6
CAVNGQAGTALIF

SEQ ID NO: 2106 - protein, 10 aa, synthetic construct
  REGION 1..10: note = Description of sequence: CDR3 from Table 6
CAYTHARLMF

SEQ ID NO: 2107 - protein, 17 aa, synthetic construct
  REGION 1..17: note = Description of sequence: CDR3 from Table 6
CAGIPDAGGTSYGKLTF

SEQ ID NO: 2108 - protein, 15 aa, synthetic construct
  REGION 1..15: note = Description of sequence: CDR3 from Table 6
CAVNKPGFGNEKLTF

SEQ ID NO: 2109 - protein, 13 aa, synthetic construct
  REGION 1..13: note = Description of sequence: CDR3 from Table 6
CAGRKTSYDKVIF

SEQ ID NO: 2110 - protein, 15 aa, synthetic construct
  REGION 1..15: note = Description of sequence: CDR3 from Table 6
CAVGATNNAGNMLTF

SEQ ID NO: 2111 - protein, 12 aa, synthetic construct
  REGION 1..12: note = Description of sequence: CDR3 from Table 6
CAYWEGAQKLVF

SEQ ID NO: 2112 - protein, 14 aa, synthetic construct
  REGION 1..14: note = Description of sequence: CDR3 from Table 6
CAVNVYNQGGKLIF

SEQ ID NO: 2113 - protein, 14 aa, synthetic construct
  REGION 1..14: note = Description of sequence: CDR3 from Table 6
CAMSVSDTGNQFYF

SEQ ID NO: 2114 - protein, 16 aa, synthetic construct
  REGION 1..16: note = Description of sequence: CDR3 from Table 6
CAVGAGSNFGNEKLTF

SEQ ID NO: 2115 - protein, 12 aa, synthetic construct
  REGION 1..12: note = Description of sequence: CDR3 from Table 6
CAVRNRDDKIIF

SEQ ID NO: 2116 - protein, 15 aa, synthetic construct
  REGION 1..15: note = Description of sequence: CDR3 from Table 6
CALSEVGAGSYQLTF

SEQ ID NO: 2117 - protein, 13 aa, synthetic construct
  REGION 1..13: note = Description of sequence: CDR3 from Table 6
CAVQAGGYQKVTF

SEQ ID NO: 2118 - protein, 15 aa, synthetic construct
  REGION 1..15: note = Description of sequence: CDR3 from Table 6
CAMREGNTGGFKTIF

SEQ ID NO: 2119 - protein, 10 aa, synthetic construct
  REGION 1..10: note = Description of sequence: CDR3 from Table 6
CAYGANDMRF

SEQ ID NO: 2120 - protein, 16 aa, synthetic construct
  REGION 1..16: note = Description of sequence: CDR3 from Table 6
CAASATGGTSYGKLTF

SEQ ID NO: 2121 - protein, 11 aa, synthetic construct
  REGION 1..11: note = Description of sequence: CDR3 from Table 6
CAMHRDDKIIF

SEQ ID NO: 2122 - protein, 13 aa, synthetic construct
  REGION 1..13: note = Description of sequence: CDR3 from Table 6
CASGIQGAQKLVF

SEQ ID NO: 2123 - protein, 11 aa, synthetic construct
  REGION 1..11: note = Description of sequence: CDR3 from Table 6
CALSGYSTLTF

SEQ ID NO: 2124 - protein, 13 aa, synthetic construct
  REGION 1..13: note = Description of sequence: CDR3 from Table 6
CAVSKEGSYIPTF

SEQ ID NO: 2125 - protein, 13 aa, synthetic construct
  REGION 1..13: note = Description of sequence: CDR3 from Table 6
CAFMIDNNNDMRF

SEQ ID NO: 2126 - protein, 12 aa, synthetic construct
  REGION 1..12: note = Description of sequence: CDR3 from Table 6
CAVNAWNNDMRF

SEQ ID NO: 2127 - protein, 15 aa, synthetic construct
  REGION 1..15: note = Description of sequence: CDR3 from Table 6
CAVGGEAQGAQKLVF

SEQ ID NO: 2128 - protein, 13 aa, synthetic construct
  REGION 1..13: note = Description of sequence: CDR3 from Table 6
CAVSGAGSYQLTF

SEQ ID NO: 2129 - protein, 16 aa, synthetic construct
  REGION 1..16: note = Description of sequence: CDR3 from Table 6
CALSEAMTSGTYKYIF

SEQ ID NO: 2130 - protein, 16 aa, synthetic construct
  REGION 1..16: note = Description of sequence: CDR3 from Table 6
CAVSNLMDTGRRALTF

SEQ ID NO: 2131 - protein, 10 aa, synthetic construct
  REGION 1..10: note = Description of sequence: CDR3 from Table 6
CALSEHDMRF

SEQ ID NO: 2132 - protein, 13 aa, synthetic construct
  REGION 1..13: note = Description of sequence: CDR3 from Table 6
CATDADTGNQFYF

SEQ ID NO: 2133 - protein, 13 aa, synthetic construct
  REGION 1..13: note = Description of sequence: CDR3 from Table 6
CALNTGTASKLTF

SEQ ID NO: 2134 - protein, 14 aa, synthetic construct
  REGION 1..14: note = Description of sequence: CDR3 from Table 6
CAYYGGGATNKLIF

SEQ ID NO: 2135 - protein, 15 aa, synthetic construct
  REGION 1..15: note = Description of sequence: CDR3 from Table 6
CAMSLRSYTGNQFYF

SEQ ID NO: 2136 - protein, 13 aa, synthetic construct
  REGION 1..13: note = Description of sequence: CDR3 from Table 6
CAAKDNYGQNFVF

SEQ ID NO: 2137 - protein, 15 aa, synthetic construct
  REGION 1..15: note = Description of sequence: CDR3 from Table 6
CAASLRYFGNEKLTF

SEQ ID NO: 2138 - protein, 13 aa, synthetic construct
  REGION 1..13: note = Description of sequence: CDR3 from Table 6
CAVTDYNTDKLIF

SEQ ID NO: 2139 - protein, 12 aa, synthetic construct
  REGION 1..12: note = Description of sequence: CDR3 from Table 6
CAYVEGNYQLIW

SEQ ID NO: 2140 - protein, 16 aa, synthetic construct
  REGION 1..16: note = Description of sequence: CDR3 from Table 6
CALSEVRYSSASKIIF

SEQ ID NO: 2141 - protein, 15 aa, synthetic construct
  REGION 1..15: note = Description of sequence: CDR3 from Table 6
CALRGRVAGANNLFF

SEQ ID NO: 2142 - protein, 14 aa, synthetic construct
  REGION 1..14: note = Description of sequence: CDR3 from Table 6
CAVAFNNAGNMLTF

SEQ ID NO: 2143 - protein, 16 aa, synthetic construct
  REGION 1..16: note = Description of sequence: CDR3 from Table 6
CVVSGVNVWGTYKYIF

SEQ ID NO: 2144 - protein, 13 aa, synthetic construct
  REGION 1..13: note = Description of sequence: CDR3 from Table 6
CAFPMDSNYQLIW

SEQ ID NO: 2145 - protein, 10 aa, synthetic construct
  REGION 1..10: note = Description of sequence: CDR3 from Table 6
CAPGGEKLTF

SEQ ID NO: 2146 - protein, 12 aa, synthetic construct
  REGION 1..12: note = Description of sequence: CDR3 from Table 6
CSVGGGSEKLVF

SEQ ID NO: 2147 - protein, 13 aa, synthetic construct
  REGION 1..13: note = Description of sequence: CDR3 from Table 6
CAGLNSDGQKLLF

SEQ ID NO: 2148 - protein, 14 aa, synthetic construct
  REGION 1..14: note = Description of sequence: CDR3 from Table 6
CAVNSKSGYSTLTF

SEQ ID NO: 2149 - protein, 14 aa, synthetic construct
  REGION 1..14: note = Description of sequence: CDR3 from Table 6
CAVSMDTGRRALTF

SEQ ID NO: 2150 - protein, 12 aa, synthetic construct
  REGION 1..12: note = Description of sequence: CDR3 from Table 6
CAMREGGNDMRF

SEQ ID NO: 2151 - protein, 14 aa, synthetic construct
  REGION 1..14: note = Description of sequence: CDR3 from Table 6
CAVRDKNRDDKIIF

SEQ ID NO: 2152 - protein, 14 aa, synthetic construct
  REGION 1..14: note = Description of sequence: CDR3 from Table 6
CAEKGAGGSYIPTF

SEQ ID NO: 2153 - protein, 15 aa, synthetic construct
  REGION 1..15: note = Description of sequence: CDR3 from Table 6
CAMREVREAGNQFYF

SEQ ID NO: 2154 - protein, 11 aa, synthetic construct
  REGION 1..11: note = Description of sequence: CDR3 from Table 6
CAYLDDYKLSF

SEQ ID NO: 2155 - protein, 14 aa, synthetic construct
  REGION 1..14: note = Description of sequence: CDR3 from Table 6
CAVRLDDFGNVLHC

SEQ ID NO: 2156 - protein, 16 aa, synthetic construct
  REGION 1..16: note = Description of sequence: CDR3 from Table 6
CAMREGPSQAGTALIF

SEQ ID NO: 2157 - protein, 13 aa, synthetic construct
  REGION 1..13: note = Description of sequence: CDR3 from Table 6
CALYGGSQGNLIF

SEQ ID NO: 2158 - protein, 13 aa, synthetic construct
  REGION 1..13: note = Description of sequence: CDR3 from Table 6
CAMRGSDGQKLLF

SEQ ID NO: 2159 - protein, 17 aa, synthetic construct
  REGION 1..17: note = Description of sequence: CDR3 from Table 6
CAMREPYSGAGSYQLTF

SEQ ID NO: 2160 - protein, 10 aa, synthetic construct
  REGION 1..10: note = Description of sequence: CDR3 from Table 6
CAYFELDMRF

SEQ ID NO: 2161 - protein, 10 aa, synthetic construct
  REGION 1..10: note = Description of sequence: CDR3 from Table 6
CAYSTGDMRF

SEQ ID NO: 2162 - protein, 14 aa, synthetic construct
  REGION 1..14: note = Description of sequence: CDR3 from Table 6
CVVSPYNQGGKLIF

SEQ ID NO: 2163 - protein, 12 aa, synthetic construct
  REGION 1..12: note = Description of sequence: CDR3 from Table 6
CAESRGTDKLIF

SEQ ID NO: 2164 - protein, 12 aa, synthetic construct
  REGION 1..12: note = Description of sequence: CDR3 from Table 6
CALQTGANNLFF

SEQ ID NO: 2165 - protein, 12 aa, synthetic construct
  REGION 1..12: note = Description of sequence: CDR3 from Table 6
CAEYSSASKIIF

SEQ ID NO: 2166 - protein, 13 aa, synthetic construct
  REGION 1..13: note = Description of sequence: CDR3 from Table 6
CAVLNSGNTPLVF

SEQ ID NO: 2167 - protein, 14 aa, synthetic construct
  REGION 1..14: note = Description of sequence: CDR3 from Table 6
CAGNYGGSQGNLIF

SEQ ID NO: 2168 - protein, 16 aa, synthetic construct
  REGION 1..16: note = Description of sequence: CDR3 from Table 6
CILRDALIQAGNMLTF

SEQ ID NO: 2169 - protein, 16 aa, synthetic construct
  REGION 1..16: note = Description of sequence: CDR3 from Table 6
CAVNLNYGGSQGNLIF

SEQ ID NO: 2170 - protein, 14 aa, synthetic construct
  REGION 1..14: note = Description of sequence: CDR3 from Table 6
CAVNPVQGAQKLVF

SEQ ID NO: 2171 - protein, 15 aa, synthetic construct
  REGION 1..15: note = Description of sequence: CDR3 from Table 6
CAASAGLAGSYQLTF

SEQ ID NO: 2172 - protein, 7 aa, synthetic construct
  REGION 1..7: note = Description of sequence: CDR3 from Table 6
CAASEAF

SEQ ID NO: 2173 - protein, 13 aa, synthetic construct
  REGION 1..13: note = Description of sequence: CDR3 from Table 6
CAVRESYGQNFVF

SEQ ID NO: 2174 - protein, 11 aa, synthetic construct
  REGION 1..11: note = Description of sequence: CDR3 from Table 6
CAVRGYSTLTF

SEQ ID NO: 2175 - protein, 12 aa, synthetic construct
  REGION 1..12: note = Description of sequence: CDR3 from Table 6
CAVVTTTDKLIF

SEQ ID NO: 2176 - protein, 13 aa, synthetic construct
  REGION 1..13: note = Description of sequence: CDR3 from Table 6
CAVMDDSWGKLQF

SEQ ID NO: 2177 - protein, 15 aa, synthetic construct
  REGION 1..15: note = Description of sequence: CDR3 from Table 6
CAVSNSGGSNYKLTF

SEQ ID NO: 2178 - protein, 15 aa, synthetic construct
  REGION 1..15: note = Description of sequence: CDR3 from Table 6
CAETGQGGGADGLTF

SEQ ID NO: 2179 - protein, 13 aa, synthetic construct
  REGION 1..13: note = Description of sequence: CDR3 from Table 6
CAVRDMDNARLMF

SEQ ID NO: 2180 - protein, 13 aa, synthetic construct
  REGION 1..13: note = Description of sequence: CDR3 from Table 6
CAVRDQAGTALIF

SEQ ID NO: 2181 - protein, 13 aa, synthetic construct
  REGION 1..13: note = Description of sequence: CDR3 from Table 6
CAETGDSNYQLIW

SEQ ID NO: 2182 - protein, 12 aa, synthetic construct
  REGION 1..12: note = Description of sequence: CDR3 from Table 6
CAVRTSYDKVIF

SEQ ID NO: 2183 - protein, 15 aa, synthetic construct
  REGION 1..15: note = Description of sequence: CDR3 from Table 6
CAMSATASGTYKYIF

SEQ ID NO: 2184 - protein, 15 aa, synthetic construct
  REGION 1..15: note = Description of sequence: CDR3 from Table 6
CVVNQRGGGADGLTF

SEQ ID NO: 2185 - protein, 14 aa, synthetic construct
  REGION 1..14: note = Description of sequence: CDR3 from Table 6
CALSEAENDYKLSF

SEQ ID NO: 2186 - protein, 16 aa, synthetic construct
  REGION 1..16: note = Description of sequence: CDR3 from Table 6
CAESLRPGGGADGLTF

SEQ ID NO: 2187 - protein, 16 aa, synthetic construct
  REGION 1..16: note = Description of sequence: CDR3 from Table 6
CAVQASSGAGSYQLTF

SEQ ID NO: 2188 - protein, 13 aa, synthetic construct
  REGION 1..13: note = Description of sequence: CDR3 from Table 6
CAVGGGSQGNLIF

SEQ ID NO: 2189 - protein, 15 aa, synthetic construct
  REGION 1..15: note = Description of sequence: CDR3 from Table 6
CALRDSSGGSYIPTF

SEQ ID NO: 2190 - protein, 12 aa, synthetic construct
  REGION 1..12: note = Description of sequence: CDR3 from Table 6
CVTGTNAGKSTF

SEQ ID NO: 2191 - protein, 16 aa, synthetic construct
  REGION 1..16: note = Description of sequence: CDR3 from Table 6
CALSDSVNNAGNMLTF

SEQ ID NO: 2192 - protein, 16 aa, synthetic construct
  REGION 1..16: note = Description of sequence: CDR3 from Table 6
CIVRGDIKAAGNKLTF

SEQ ID NO: 2193 - protein, 14 aa, synthetic construct
  REGION 1..14: note = Description of sequence: CDR3 from Table 6
CALADMNRDDKIIF

SEQ ID NO: 2194 - protein, 13 aa, synthetic construct
  REGION 1..13: note = Description of sequence: CDR3 from Table 6
CAVKGGGSYIPTF

SEQ ID NO: 2195 - protein, 16 aa, synthetic construct
  REGION 1..16: note = Description of sequence: CDR3 from Table 6
CAIHRGPGAGSYQLTF

SEQ ID NO: 2196 - protein, 14 aa, synthetic construct
  REGION 1..14: note = Description of sequence: CDR3 from Table 6
CAMREPDSNYQLIW

SEQ ID NO: 2197 - protein, 12 aa, synthetic construct
  REGION 1..12: note = Description of sequence: CDR3 from Table 6
CAVYSSASKIIF

SEQ ID NO: 2198 - protein, 14 aa, synthetic construct
  REGION 1..14: note = Description of sequence: CDR3 from Table 6
CALRENYNNNDMRF

SEQ ID NO: 2199 - protein, 12 aa, synthetic construct
  REGION 1..12: note = Description of sequence: CDR3 from Table 6
CAVKTSYDKVIF

SEQ ID NO: 2200 - protein, 15 aa, synthetic construct
  REGION 1..15: note = Description of sequence: CDR3 from Table 6
CVVTTTGGGYNKLIF

SEQ ID NO: 2201 - protein, 13 aa, synthetic construct
  REGION 1..13: note = Description of sequence: CDR3 from Table 6
CAATPTNAGKSTF

SEQ ID NO: 2202 - protein, 14 aa, synthetic construct
  REGION 1..14: note = Description of sequence: CDR3 from Table 6
CAGHNNNAGNMLTF

SEQ ID NO: 2203 - protein, 13 aa, synthetic construct
  REGION 1..13: note = Description of sequence: CDR3 from Table 6
CASGEYYGQNFVF

SEQ ID NO: 2204 - protein, 13 aa, synthetic construct
  REGION 1..13: note = Description of sequence: CDR3 from Table 6
CAVGGYNFNKFYF

SEQ ID NO: 2205 - protein, 15 aa, synthetic construct
  REGION 1..15: note = Description of sequence: CDR3 from Table 6
CALSEADTGGFKTIF

SEQ ID NO: 2206 - protein, 13 aa, synthetic construct
  REGION 1..13: note = Description of sequence: CDR3 from Table 6
CAGTGAGSYQLTF

SEQ ID NO: 2207 - protein, 15 aa, synthetic construct
  REGION 1..15: note = Description of sequence: CDR3 from Table 6
CAVRDMQDSNYQLIW

SEQ ID NO: 2208 - protein, 15 aa, synthetic construct
  REGION 1..15: note = Description of sequence: CDR3 from Table 6
CAMRANSGGYQKVTF

SEQ ID NO: 2209 - protein, 15 aa, synthetic construct
  REGION 1..15: note = Description of sequence: CDR3 from Table 6
CAVRDRAGGYQKVTF

SEQ ID NO: 2210 - protein, 11 aa, synthetic construct
  REGION 1..11: note = Description of sequence: CDR3 from Table 6
CVVSLDYIPTF

SEQ ID NO: 2211 - protein, 11 aa, synthetic construct
  REGION 1..11: note = Description of sequence: CDR3 from Table 6
CAEKNTDKLIF

SEQ ID NO: 2212 - protein, 16 aa, synthetic construct
  REGION 1..16: note = Description of sequence: CDR3 from Table 6
CAVAVWGNNAGNMLTF

SEQ ID NO: 2213 - protein, 13 aa, synthetic construct
  REGION 1..13: note = Description of sequence: CDR3 from Table 6
CVVSNSGNTPLVF

SEQ ID NO: 2214 - protein, 14 aa, synthetic construct
  REGION 1..14: note = Description of sequence: CDR3 from Table 6
CALSEANDGQKLLF

SEQ ID NO: 2215 - protein, 14 aa, synthetic construct
  REGION 1..14: note = Description of sequence: CDR3 from Table 6
CAVSLYNQGGKLIF

SEQ ID NO: 2216 - protein, 12 aa, synthetic construct
  REGION 1..12: note = Description of sequence: CDR3 from Table 6
CAVETSYDKVIF

SEQ ID NO: 2217 - protein, 16 aa, synthetic construct
  REGION 1..16: note = Description of sequence: CDR3 from Table 6
CAMREPSQGGSEKLVF

SEQ ID NO: 2218 - protein, 13 aa, synthetic construct
  REGION 1..13: note = Description of sequence: CDR3 from Table 6
CASAGTSYDKVIF

SEQ ID NO: 2219 - protein, 14 aa, synthetic construct
  REGION 1..14: note = Description of sequence: CDR3 from Table 6
CAESSSGSARQLTF

SEQ ID NO: 2220 - protein, 16 aa, synthetic construct
  REGION 1..16: note = Description of sequence: CDR3 from Table 6
CAASAQGGTSYGKLTF

SEQ ID NO: 2221 - protein, 12 aa, synthetic construct
  REGION 1..12: note = Description of sequence: CDR3 from Table 6
CAVFYGNNRLAF

SEQ ID NO: 2222 - protein, 15 aa, synthetic construct
  REGION 1..15: note = Description of sequence: CDR3 from Table 6
CALSEVITGANNLFF

SEQ ID NO: 2223 - protein, 16 aa, synthetic construct
  REGION 1..16: note = Description of sequence: CDR3 from Table 6
CAVRDWYGGSQGNLIF

SEQ ID NO: 2224 - protein, 9 aa, synthetic construct
  REGION 1..9: note = Description of sequence: CDR3 from Table 6
CAGADKLIF

SEQ ID NO: 2225 - protein, 17 aa, synthetic construct
  REGION 1..17: note = Description of sequence: CDR3 from Table 6
CAESSFYVSGGYNKLIF

SEQ ID NO: 2226 - protein, 17 aa, synthetic construct
  REGION 1..17: note = Description of sequence: CDR3 from Table 6
CVVSDKEWGGGADGLTF

SEQ ID NO: 2227 - protein, 11 aa, synthetic construct
  REGION 1..11: note = Description of sequence: CDR3 from Table 6
CAAPRNDKIIF

SEQ ID NO: 2228 - protein, 16 aa, synthetic construct
  REGION 1..16: note = Description of sequence: CDR3 from Table 6
CALGELVTGGGNKLTF

SEQ ID NO: 2229 - protein, 10 aa, synthetic construct
  REGION 1..10: note = Description of sequence: CDR3 from Table 6
CAVISNQFYF

SEQ ID NO: 2230 - protein, 12 aa, synthetic construct
  REGION 1..12: note = Description of sequence: CDR3 from Table 6
PNYGGSQGNLIF

SEQ ID NO: 2231 - protein, 12 aa, synthetic construct
  REGION 1..12: note = Description of sequence: CDR3 from Table 6
CAVNPRDDKIIF

SEQ ID NO: 2232 - protein, 14 aa, synthetic construct
  REGION 1..14: note = Description of sequence: CDR3 from Table 6
CAVKDRGGSEKLVF

SEQ ID NO: 2233 - protein, 11 aa, synthetic construct
  REGION 1..11: note = Description of sequence: CDR3 from Table 6
CAASNDQKLVF

SEQ ID NO: 2234 - protein, 14 aa, synthetic construct
  REGION 1..14: note = Description of sequence: CDR3 from Table 6
CAAFSNQAGTALIF

SEQ ID NO: 2235 - protein, 15 aa, synthetic construct
  REGION 1..15: note = Description of sequence: CDR3 from Table 6
CAVGFDNNAGNMLTF

SEQ ID NO: 2236 - protein, 14 aa, synthetic construct
  REGION 1..14: note = Description of sequence: CDR3 from Table 6
CGTRGGSGNTPLVF

SEQ ID NO: 2237 - protein, 11 aa, synthetic construct
  REGION 1..11: note = Description of sequence: CDR3 from Table 6
CAVANDYKLSF

SEQ ID NO: 2238 - protein, 14 aa, synthetic construct
  REGION 1..14: note = Description of sequence: CDR3 from Table 6
CALLTEDSNYQLIW

SEQ ID NO: 2239 - protein, 13 aa, synthetic construct
  REGION 1..13: note = Description of sequence: CDR3 from Table 6
CAVIPDSNYQLIW

SEQ ID NO: 2240 - protein, 9 aa, synthetic construct
  REGION 1..9: note = Description of sequence: CDR3 from Table 6
CAYYTPLVF

SEQ ID NO: 2241 - protein, 13 aa, synthetic construct
  REGION 1..13: note = Description of sequence: CDR3 from Table 6
CAVDPNTGNQFYF

SEQ ID NO: 2242 - protein, 11 aa, synthetic construct
  REGION 1..11: note = Description of sequence: CDR3 from Table 6
CAVNTGNQFYF

SEQ ID NO: 2243 - protein, 12 aa, synthetic construct
  REGION 1..12: note = Description of sequence: CDR3 from Table 6
CAVLLYGNKLVF

SEQ ID NO: 2244 - protein, 13 aa, synthetic construct
  REGION 1..13: note = Description of sequence: CDR3 from Table 6
CALTQGGSEKLVF

SEQ ID NO: 2245 - protein, 13 aa, synthetic construct
  REGION 1..13: note = Description of sequence: CDR3 from Table 6
CAVTTDSWGKLQF

SEQ ID NO: 2246 - protein, 12 aa, synthetic construct
  REGION 1..12: note = Description of sequence: CDR3 from Table 6
CIVRVDNARLMF

SEQ ID NO: 2247 - protein, 17 aa, synthetic construct
  REGION 1..17: note = Description of sequence: CDR3 from Table 6
CAMREDAGGTSYGKLTF

SEQ ID NO: 2248 - protein, 14 aa, synthetic construct
  REGION 1..14: note = Description of sequence: CDR3 from Table 6
CAVGNSGGYQKVTF

SEQ ID NO: 2249 - protein, 11 aa, synthetic construct
  REGION 1..11: note = Description of sequence: CDR3 from Table 6
CAFSDGQKLLF

SEQ ID NO: 2250 - protein, 13 aa, synthetic construct
  REGION 1..13: note = Description of sequence: CDR3 from Table 6
CAVKMDSNYQLIW

SEQ ID NO: 2251 - protein, 12 aa, synthetic construct
  REGION 1..12: note = Description of sequence: CDR3 from Table 6
CAVTGSGYALNF

SEQ ID NO: 2252 - protein, 12 aa, synthetic construct
  REGION 1..12: note = Description of sequence: CDR3 from Table 6
CAATSNTGKLIF

SEQ ID NO: 2253 - protein, 12 aa, synthetic construct
  REGION 1..12: note = Description of sequence: CDR3 from Table 6
CVGMDSSYKLIF

SEQ ID NO: 2254 - protein, 14 aa, synthetic construct
  REGION 1..14: note = Description of sequence: CDR3 from Table 6
CAVRYYFGNEKLTF

SEQ ID NO: 2255 - protein, 13 aa, synthetic construct
  REGION 1..13: note = Description of sequence: CDR3 from Table 6
CAASGGGADGLTF

SEQ ID NO: 2256 - protein, 15 aa, synthetic construct
  REGION 1..15: note = Description of sequence: CDR3 from Table 6
CAVIPRGGSNYKLTF

SEQ ID NO: 2257 - protein, 12 aa, synthetic construct
  REGION 1..12: note = Description of sequence: CDR3 from Table 6
CAYGGGTYKYIF

SEQ ID NO: 2258 - protein, 12 aa, synthetic construct
  REGION 1..12: note = Description of sequence: CDR3 from Table 6
CAVMTGGFKTIF

SEQ ID NO: 2259 - protein, 14 aa, synthetic construct
  REGION 1..14: note = Description of sequence: CDR3 from Table 6
CALTQSGGYQKVTF

SEQ ID NO: 2260 - protein, 10 aa, synthetic construct
  REGION 1..10: note = Description of sequence: CDR3 from Table 6
CALGDYKLSF

SEQ ID NO: 2261 - protein, 12 aa, synthetic construct
  REGION 1..12: note = Description of sequence: CDR3 from Table 6
CAMIFNDYKLSF

SEQ ID NO: 2262 - protein, 16 aa, synthetic construct
  REGION 1..16: note = Description of sequence: CDR3 from Table 6
CAVSDLNSGGYQKVTF

SEQ ID NO: 2263 - protein, 10 aa, synthetic construct
  REGION 1..10: note = Description of sequence: CDR3 from Table 6
CAVNNARLMF

SEQ ID NO: 2264 - protein, 10 aa, synthetic construct
  REGION 1..10: note = Description of sequence: CDR3 from Table 6
CAIEGGKLIF

SEQ ID NO: 2265 - protein, 13 aa, synthetic construct
  REGION 1..13: note = Description of sequence: CDR3 from Table 6
CAMKDFGNEKLTF

SEQ ID NO: 2266 - protein, 11 aa, synthetic construct
  REGION 1..11: note = Description of sequence: CDR3 from Table 6
CAVITGTALIF

SEQ ID NO: 2267 - protein, 18 aa, synthetic construct
  REGION 1..18: note = Description of sequence: CDR3 from Table 6
CAMREFNAGGTSYGKLTF

SEQ ID NO: 2268 - protein, 19 aa, synthetic construct
  REGION 1..19: note = Description of sequence: CDR3 from Table 6
CAMRETWGGLGGSQGNLIF

SEQ ID NO: 2269 - protein, 12 aa, synthetic construct
  REGION 1..12: note = Description of sequence: CDR3 from Table 6
CAVYTGGFKTIF

SEQ ID NO: 2270 - protein, 15 aa, synthetic construct
  REGION 1..15: note = Description of sequence: CDR3 from Table 6
CAVPVLGGSQGNLIF

SEQ ID NO: 2271 - protein, 13 aa, synthetic construct
  REGION 1..13: note = Description of sequence: CDR3 from Table 6
CATDANTGNQFYF

SEQ ID NO: 2272 - protein, 14 aa, synthetic construct
  REGION 1..14: note = Description of sequence: CDR3 from Table 6
CALLSNQAGTALIF

SEQ ID NO: 2273 - protein, 15 aa, synthetic construct
  REGION 1..15: note = Description of sequence: CDR3 from Table 6
CAVGDAGGATNKLIF

SEQ ID NO: 2274 - protein, 15 aa, synthetic construct
  REGION 1..15: note = Description of sequence: CDR3 from Table 6
CALSEPIYNFNKFYF

SEQ ID NO: 2275 - protein, 14 aa, synthetic construct
  REGION 1..14: note = Description of sequence: CDR3 from Table 6
CAVEDLGFGNVLHC

SEQ ID NO: 2276 - protein, 12 aa, synthetic construct
  REGION 1..12: note = Description of sequence: CDR3 from Table 6
CAVNPGGFKTIF

SEQ ID NO: 2277 - protein, 12 aa, synthetic construct
  REGION 1..12: note = Description of sequence: CDR3 from Table 6
CAVSPGGFKTIF

SEQ ID NO: 2278 - protein, 13 aa, synthetic construct
  REGION 1..13: note = Description of sequence: CDR3 from Table 6
CAERDQAGTALIF

SEQ ID NO: 2279 - protein, 12 aa, synthetic construct
  REGION 1..12: note = Description of sequence: CDR3 from Table 6
CAVGYNTDKLIF

SEQ ID NO: 2280 - protein, 12 aa, synthetic construct
  REGION 1..12: note = Description of sequence: CDR3 from Table 6
CAVRGSARQLTF

SEQ ID NO: 2281 - protein, 14 aa, synthetic construct
  REGION 1..14: note = Description of sequence: CDR3 from Table 6
CAMDKMDSNYQLIW

SEQ ID NO: 2282 - protein, 15 aa, synthetic construct
  REGION 1..15: note = Description of sequence: CDR3 from Table 6
CAMRESKAAGNKLTF

SEQ ID NO: 2283 - protein, 14 aa, synthetic construct
  REGION 1..14: note = Description of sequence: CDR3 from Table 6
CAASLNTNAGKSTF

SEQ ID NO: 2284 - protein, 15 aa, synthetic construct
  REGION 1..15: note = Description of sequence: CDR3 from Table 6
CAMRESSYGNNRLAF

SEQ ID NO: 2285 - protein, 15 aa, synthetic construct
  REGION 1..15: note = Description of sequence: CDR3 from Table 6
CAVNMEGAGSYQLTF

SEQ ID NO: 2286 - protein, 12 aa, synthetic construct
  REGION 1..12: note = Description of sequence: CDR3 from Table 6
CAENKDDYKLSF

SEQ ID NO: 2287 - protein, 16 aa, synthetic construct
  REGION 1..16: note = Description of sequence: CDR3 from Table 6
CAGAEISGGGADGLTF

SEQ ID NO: 2288 - protein, 17 aa, synthetic construct
  REGION 1..17: note = Description of sequence: CDR3 from Table 6
CAMREFYSGGGADGLTF

SEQ ID NO: 2289 - protein, 13 aa, synthetic construct
  REGION 1..13: note = Description of sequence: CDR3 from Table 6
RINSGGSNYKLTF

SEQ ID NO: 2290 - protein, 13 aa, synthetic construct
  REGION 1..13: note = Description of sequence: CDR3 from Table 6
CAVVMEYGNKLVF

SEQ ID NO: 2291 - protein, 15 aa, synthetic construct
  REGION 1..15: note = Description of sequence: CDR3 from Table 6
CATASLRNYGQNFVF

SEQ ID NO: 2292 - protein, 17 aa, synthetic construct
  REGION 1..17: note = Description of sequence: CDR3 from Table 6
CIVRVDERGTSYGKLTF

SEQ ID NO: 2293 - protein, 13 aa, synthetic construct
  REGION 1..13: note = Description of sequence: CDR3 from Table 6
CAVGAEYGNKLVF

SEQ ID NO: 2294 - protein, 16 aa, synthetic construct
  REGION 1..16: note = Description of sequence: CDR3 from Table 6
CAVTWGHNNAGNMLTF

SEQ ID NO: 2295 - protein, 14 aa, synthetic construct
  REGION 1..14: note = Description of sequence: CDR3 from Table 6
CALLLGGGADGLTF

SEQ ID NO: 2296 - protein, 14 aa, synthetic construct
  REGION 1..14: note = Description of sequence: CDR3 from Table 6
CAMIGNSGNTPLVF

SEQ ID NO: 2297 - protein, 15 aa, synthetic construct
  REGION 1..15: note = Description of sequence: CDR3 from Table 6
CAENRNAGNNRKLIW

SEQ ID NO: 2298 - protein, 14 aa, synthetic construct
  REGION 1..14: note = Description of sequence: CDR3 from Table 6
CALSNAGNNRKLIW

SEQ ID NO: 2299 - protein, 14 aa, synthetic construct
  REGION 1..14: note = Description of sequence: CDR3 from Table 6
CAVRDTGGGNKLTF

SEQ ID NO: 2300 - protein, 14 aa, synthetic construct
  REGION 1..14: note = Description of sequence: CDR3 from Table 6
CVALRGGSQGNLIF

SEQ ID NO: 2301 - protein, 14 aa, synthetic construct
  REGION 1..14: note = Description of sequence: CDR3 from Table 6
CAEIGNTGGFKTIF

SEQ ID NO: 2302 - protein, 12 aa, synthetic construct
  REGION 1..12: note = Description of sequence: CDR3 from Table 6
CAVNRDDYKLSF

SEQ ID NO: 2303 - protein, 13 aa, synthetic construct
  REGION 1..13: note = Description of sequence: CDR3 from Table 6
CAVLTDSWGKLQF

SEQ ID NO: 2304 - protein, 13 aa, synthetic construct
  REGION 1..13: note = Description of sequence: CDR3 from Table 6
CAGDGGSQGNLIF

SEQ ID NO: 2305 - protein, 13 aa, synthetic construct
  REGION 1..13: note = Description of sequence: CDR3 from Table 6
CVVNPYNTDKLIF

SEQ ID NO: 2306 - protein, 16 aa, synthetic construct
  REGION 1..16: note = Description of sequence: CDR3 from Table 6
CAGQMYSGGGADGLTF

SEQ ID NO: 2307 - protein, 14 aa, synthetic construct
  REGION 1..14: note = Description of sequence: CDR3 from Table 6
CIVRVRDSNYQLIW

SEQ ID NO: 2308 - protein, 14 aa, synthetic construct
  REGION 1..14: note = Description of sequence: CDR3 from Table 6
CAAFSHTNAGKSTF

SEQ ID NO: 2309 - protein, 14 aa, synthetic construct
  REGION 1..14: note = Description of sequence: CDR3 from Table 6
CVVISTDSWGKFQF

SEQ ID NO: 2310 - protein, 12 aa, synthetic construct
  REGION 1..12: note = Description of sequence: CDR3 from Table 6
CATDVYDYKLSF

SEQ ID NO: 2311 - protein, 14 aa, synthetic construct
  REGION 1..14: note = Description of sequence: CDR3 from Table 6
CAPPIEGGSEKLVF

SEQ ID NO: 2312 - protein, 13 aa, synthetic construct
  REGION 1..13: note = Description of sequence: CDR3 from Table 6
CSVPEGNTGELFF

SEQ ID NO: 2313 - protein, 11 aa, synthetic construct
  REGION 1..11: note = Description of sequence: CDR3 from Table 6
CASSLEGEQYF

SEQ ID NO: 2314 - protein, 12 aa, synthetic construct
  REGION 1..12: note = Description of sequence: CDR3 from Table 6
CASSQGALGYTF

SEQ ID NO: 2315 - protein, 17 aa, synthetic construct
  REGION 1..17: note = Description of sequence: CDR3 from Table 6
CASSFPDRGQGVYGYTF

SEQ ID NO: 2316 - protein, 15 aa, synthetic construct
  REGION 1..15: note = Description of sequence: CDR3 from Table 6
CASYFFALFTDTQYF

SEQ ID NO: 2317 - protein, 14 aa, synthetic construct
  REGION 1..14: note = Description of sequence: CDR3 from Table 6
CSARLKGGGDTQYF

SEQ ID NO: 2318 - protein, 13 aa, synthetic construct
  REGION 1..13: note = Description of sequence: CDR3 from Table 6
CATSRDRGTDTFF

SEQ ID NO: 2319 - protein, 17 aa, synthetic construct
  REGION 1..17: note = Description of sequence: CDR3 from Table 6
CASSYSSDFWGDQPQHF

SEQ ID NO: 2320 - protein, 17 aa, synthetic construct
  REGION 1..17: note = Description of sequence: CDR3 from Table 6
CASSGAAGTSAYNEQFF

SEQ ID NO: 2321 - protein, 17 aa, synthetic construct
  REGION 1..17: note = Description of sequence: CDR3 from Table 6
CASSYASTGTLNYGYTF

SEQ ID NO: 2322 - protein, 14 aa, synthetic construct
  REGION 1..14: note = Description of sequence: CDR3 from Table 6
CASSPDLNPYEQYF

SEQ ID NO: 2323 - protein, 14 aa, synthetic construct
  REGION 1..14: note = Description of sequence: CDR3 from Table 6
CASSSQGETYEQYF

SEQ ID NO: 2324 - protein, 14 aa, synthetic construct
  REGION 1..14: note = Description of sequence: CDR3 from Table 6
CATAKEGLAYEQFF

SEQ ID NO: 2325 - protein, 18 aa, synthetic construct
  REGION 1..18: note = Description of sequence: CDR3 from Table 6
CASSSGLAGGPKHYEQYF

SEQ ID NO: 2326 - protein, 14 aa, synthetic construct
  REGION 1..14: note = Description of sequence: CDR3 from Table 6
CATSRDRGLTEAFF

SEQ ID NO: 2327 - protein, 13 aa, synthetic construct
  REGION 1..13: note = Description of sequence: CDR3 from Table 6
CASSYGGNSPLHF

SEQ ID NO: 2328 - protein, 13 aa, synthetic construct
  REGION 1..13: note = Description of sequence: CDR3 from Table 6
CSADVGGQNEQYF

SEQ ID NO: 2329 - protein, 13 aa, synthetic construct
  REGION 1..13: note = Description of sequence: CDR3 from Table 6
CASSVGTGYEQYF

SEQ ID NO: 2330 - protein, 15 aa, synthetic construct
  REGION 1..15: note = Description of sequence: CDR3 from Table 6
CASSLSSRSNQPQHF

SEQ ID NO: 2331 - protein, 15 aa, synthetic construct
  REGION 1..15: note = Description of sequence: CDR3 from Table 6
CASSSRQGAGDTQYF

SEQ ID NO: 2332 - protein, 13 aa, synthetic construct
  REGION 1..13: note = Description of sequence: CDR3 from Table 6
CASSAGGDTEAFF

SEQ ID NO: 2333 - protein, 13 aa, synthetic construct
  REGION 1..13: note = Description of sequence: CDR3 from Table 6
CASSDGGKDGYTF

SEQ ID NO: 2334 - protein, 16 aa, synthetic construct
  REGION 1..16: note = Description of sequence: CDR3 from Table 6
CASSLWRGMGAGELFF

SEQ ID NO: 2335 - protein, 15 aa, synthetic construct
  REGION 1..15: note = Description of sequence: CDR3 from Table 6
CASSFTSGSGHEQYF

SEQ ID NO: 2336 - protein, 17 aa, synthetic construct
  REGION 1..17: note = Description of sequence: CDR3 from Table 6
CASSLAVQRPSGNTIYF

SEQ ID NO: 2337 - protein, 14 aa, synthetic construct
  REGION 1..14: note = Description of sequence: CDR3 from Table 6
CASSLSGVAYGYTF

SEQ ID NO: 2338 - protein, 13 aa, synthetic construct
  REGION 1..13: note = Description of sequence: CDR3 from Table 6
CASSQGQGSSQYF

SEQ ID NO: 2339 - protein, 14 aa, synthetic construct
  REGION 1..14: note = Description of sequence: CDR3 from Table 6
CSVRGGGDNSPLHF

SEQ ID NO: 2340 - protein, 18 aa, synthetic construct
  REGION 1..18: note = Description of sequence: CDR3 from Table 6
CASSGLAGGPFGMETQYF

SEQ ID NO: 2341 - protein, 13 aa, synthetic construct
  REGION 1..13: note = Description of sequence: CDR3 from Table 6
CASTQGGVDTQYF

SEQ ID NO: 2342 - protein, 13 aa, synthetic construct
  REGION 1..13: note = Description of sequence: CDR3 from Table 6
CASSWGPGYEQYF

SEQ ID NO: 2343 - protein, 15 aa, synthetic construct
  REGION 1..15: note = Description of sequence: CDR3 from Table 6
CASSLVDSGLYEQYF

SEQ ID NO: 2344 - protein, 15 aa, synthetic construct
  REGION 1..15: note = Description of sequence: CDR3 from Table 6
CSAREVRDLYNEQFF

SEQ ID NO: 2345 - protein, 15 aa, synthetic construct
  REGION 1..15: note = Description of sequence: CDR3 from Table 6
CASSLSSGPYNEQFF

SEQ ID NO: 2346 - protein, 15 aa, synthetic construct
  REGION 1..15: note = Description of sequence: CDR3 from Table 6
CASSLPGGPRETQYF

SEQ ID NO: 2347 - protein, 12 aa, synthetic construct
  REGION 1..12: note = Description of sequence: CDR3 from Table 6
CASSFGPYGYTF

SEQ ID NO: 2348 - protein, 15 aa, synthetic construct
  REGION 1..15: note = Description of sequence: CDR3 from Table 6
CASSLQASGRETQYF

SEQ ID NO: 2349 - protein, 12 aa, synthetic construct
  REGION 1..12: note = Description of sequence: CDR3 from Table 6
CASSLGSGTQYF

SEQ ID NO: 2350 - protein, 15 aa, synthetic construct
  REGION 1..15: note = Description of sequence: CDR3 from Table 6
CSARISTSSSYEQYF

SEQ ID NO: 2351 - protein, 16 aa, synthetic construct
  REGION 1..16: note = Description of sequence: CDR3 from Table 6
CASSLYGGESQETQYF

SEQ ID NO: 2352 - protein, 12 aa, synthetic construct
  REGION 1..12: note = Description of sequence: CDR3 from Table 6
CASSPDPYEQYF

SEQ ID NO: 2353 - protein, 11 aa, synthetic construct
  REGION 1..11: note = Description of sequence: CDR3 from Table 6
CASSFRGEAFF

SEQ ID NO: 2354 - protein, 13 aa, synthetic construct
  REGION 1..13: note = Description of sequence: CDR3 from Table 6
CASSIAAGNTIYF

SEQ ID NO: 2355 - protein, 15 aa, synthetic construct
  REGION 1..15: note = Description of sequence: CDR3 from Table 6
CASSLHREVNEKLFF

SEQ ID NO: 2356 - protein, 13 aa, synthetic construct
  REGION 1..13: note = Description of sequence: CDR3 from Table 6
CASSEWAGQPQHF

SEQ ID NO: 2357 - protein, 12 aa, synthetic construct
  REGION 1..12: note = Description of sequence: CDR3 from Table 6
CASSGGGAEAFF

SEQ ID NO: 2358 - protein, 17 aa, synthetic construct
  REGION 1..17: note = Description of sequence: CDR3 from Table 6
CASSIESGSKQRNEQFF

SEQ ID NO: 2359 - protein, 13 aa, synthetic construct
  REGION 1..13: note = Description of sequence: CDR3 from Table 6
CATREPPNTEAFF

SEQ ID NO: 2360 - protein, 14 aa, synthetic construct
  REGION 1..14: note = Description of sequence: CDR3 from Table 6
CASSYNSMNTEAFF

SEQ ID NO: 2361 - protein, 13 aa, synthetic construct
  REGION 1..13: note = Description of sequence: CDR3 from Table 6
CASSLGGPAEQYF

SEQ ID NO: 2362 - protein, 12 aa, synthetic construct
  REGION 1..12: note = Description of sequence: CDR3 from Table 6
CASSFGGYEQYF

SEQ ID NO: 2363 - protein, 14 aa, synthetic construct
  REGION 1..14: note = Description of sequence: CDR3 from Table 6
CASSSSGIGETQYF

SEQ ID NO: 2364 - protein, 16 aa, synthetic construct
  REGION 1..16: note = Description of sequence: CDR3 from Table 6
CASSYSSDRSSYEQYF

SEQ ID NO: 2365 - protein, 14 aa, synthetic construct
  REGION 1..14: note = Description of sequence: CDR3 from Table 6
CASKSWDMAYEQYF

SEQ ID NO: 2366 - protein, 18 aa, synthetic construct
  REGION 1..18: note = Description of sequence: CDR3 from Table 6
CASSSGTSLTLTYNEQFF

SEQ ID NO: 2367 - protein, 16 aa, synthetic construct
  REGION 1..16: note = Description of sequence: CDR3 from Table 6
CASSPRIGGPREGYTF

SEQ ID NO: 2368 - protein, 14 aa, synthetic construct
  REGION 1..14: note = Description of sequence: CDR3 from Table 6
CASQPWFNTGELFF

SEQ ID NO: 2369 - protein, 11 aa, synthetic construct
  REGION 1..11: note = Description of sequence: CDR3 from Table 6
CAISPGGEQFF

SEQ ID NO: 2370 - protein, 12 aa, synthetic construct
  REGION 1..12: note = Description of sequence: CDR3 from Table 6
CASSYSLAGEFF

SEQ ID NO: 2371 - protein, 12 aa, synthetic construct
  REGION 1..12: note = Description of sequence: CDR3 from Table 6
CASGKGDTEAFF

SEQ ID NO: 2372 - protein, 14 aa, synthetic construct
  REGION 1..14: note = Description of sequence: CDR3 from Table 6
CASSVETTDYGYTF

SEQ ID NO: 2373 - protein, 16 aa, synthetic construct
  REGION 1..16: note = Description of sequence: CDR3 from Table 6
CASSFAPGQGIEKLFF

SEQ ID NO: 2374 - protein, 14 aa, synthetic construct
  REGION 1..14: note = Description of sequence: CDR3 from Table 6
CASSEVSVLYEQYF

SEQ ID NO: 2375 - protein, 15 aa, synthetic construct
  REGION 1..15: note = Description of sequence: CDR3 from Table 6
CASSVETGGLDTQYF

SEQ ID NO: 2376 - protein, 13 aa, synthetic construct
  REGION 1..13: note = Description of sequence: CDR3 from Table 6
CASSRGGGTEAFF

SEQ ID NO: 2377 - protein, 12 aa, synthetic construct
  REGION 1..12: note = Description of sequence: CDR3 from Table 6
CASGAQHTEAFF

SEQ ID NO: 2378 - protein, 13 aa, synthetic construct
  REGION 1..13: note = Description of sequence: CDR3 from Table 6
CASSFEGQETQYF

SEQ ID NO: 2379 - protein, 12 aa, synthetic construct
  REGION 1..12: note = Description of sequence: CDR3 from Table 6
CAISELGYEQYF

SEQ ID NO: 2380 - protein, 12 aa, synthetic construct
  REGION 1..12: note = Description of sequence: CDR3 from Table 6
CSATSEYTEAFF

SEQ ID NO: 2381 - protein, 13 aa, synthetic construct
  REGION 1..13: note = Description of sequence: CDR3 from Table 6
CAISSDRTDEQYF

SEQ ID NO: 2382 - protein, 14 aa, synthetic construct
  REGION 1..14: note = Description of sequence: CDR3 from Table 6
CASSLDIGDQPQHF

SEQ ID NO: 2383 - protein, 11 aa, synthetic construct
  REGION 1..11: note = Description of sequence: CDR3 from Table 6
CASSFMETQYF

SEQ ID NO: 2384 - protein, 13 aa, synthetic construct
  REGION 1..13: note = Description of sequence: CDR3 from Table 6
CASSLWAGETQYF

SEQ ID NO: 2385 - protein, 12 aa, synthetic construct
  REGION 1..12: note = Description of sequence: CDR3 from Table 6
CASSLDYNEQFF

SEQ ID NO: 2386 - protein, 11 aa, synthetic construct
  REGION 1..11: note = Description of sequence: CDR3 from Table 6
CASSPGRTQYF

SEQ ID NO: 2387 - protein, 14 aa, synthetic construct
  REGION 1..14: note = Description of sequence: CDR3 from Table 6
CASSMAAGTHEQYF

SEQ ID NO: 2388 - protein, 15 aa, synthetic construct
  REGION 1..15: note = Description of sequence: CDR3 from Table 6
CSARTDRGNNYGYTF

SEQ ID NO: 2389 - protein, 13 aa, synthetic construct
  REGION 1..13: note = Description of sequence: CDR3 from Table 6
CASSANQGYEQYF

SEQ ID NO: 2390 - protein, 12 aa, synthetic construct
  REGION 1..12: note = Description of sequence: CDR3 from Table 6
CASSEWGIEAFF

SEQ ID NO: 2391 - protein, 13 aa, synthetic construct
  REGION 1..13: note = Description of sequence: CDR3 from Table 6
CASSQVEGYEQYF

SEQ ID NO: 2392 - protein, 18 aa, synthetic construct
  REGION 1..18: note = Description of sequence: CDR3 from Table 6
CASSEISSGGPFLDTQYF

SEQ ID NO: 2393 - protein, 15 aa, synthetic construct
  REGION 1..15: note = Description of sequence: CDR3 from Table 6
CASSYSSRVNYEQYF

SEQ ID NO: 2394 - protein, 15 aa, synthetic construct
  REGION 1..15: note = Description of sequence: CDR3 from Table 6
CASSSGLAGNSTQYF

SEQ ID NO: 2395 - protein, 11 aa, synthetic construct
  REGION 1..11: note = Description of sequence: CDR3 from Table 6
CASTTGLEAFF

SEQ ID NO: 2396 - protein, 15 aa, synthetic construct
  REGION 1..15: note = Description of sequence: CDR3 from Table 6
CSARDLGGGGDEQFF

SEQ ID NO: 2397 - protein, 14 aa, synthetic construct
  REGION 1..14: note = Description of sequence: CDR3 from Table 6
CASSLATGGGEQYF

SEQ ID NO: 2398 - protein, 14 aa, synthetic construct
  REGION 1..14: note = Description of sequence: CDR3 from Table 6
CASSYGGISYGYTF

SEQ ID NO: 2399 - protein, 14 aa, synthetic construct
  REGION 1..14: note = Description of sequence: CDR3 from Table 6
CASSYASGGYEQYF

SEQ ID NO: 2400 - protein, 15 aa, synthetic construct
  REGION 1..15: note = Description of sequence: CDR3 from Table 6
CASSVGGDIGIGYTF

SEQ ID NO: 2401 - protein, 12 aa, synthetic construct
  REGION 1..12: note = Description of sequence: CDR3 from Table 6
CASSFGPVEQYF

SEQ ID NO: 2402 - protein, 13 aa, synthetic construct
  REGION 1..13: note = Description of sequence: CDR3 from Table 6
CATSEGLQYEQYF

SEQ ID NO: 2403 - protein, 14 aa, synthetic construct
  REGION 1..14: note = Description of sequence: CDR3 from Table 6
CSVTQGDGTDTQYF

SEQ ID NO: 2404 - protein, 17 aa, synthetic construct
  REGION 1..17: note = Description of sequence: CDR3 from Table 6
CASSVEGAHPIQETQYF

SEQ ID NO: 2405 - protein, 16 aa, synthetic construct
  REGION 1..16: note = Description of sequence: CDR3 from Table 6
CASSLGQTVTQETQYF

SEQ ID NO: 2406 - protein, 17 aa, synthetic construct
  REGION 1..17: note = Description of sequence: CDR3 from Table 6
CASSQDLTASYYNEQFF

SEQ ID NO: 2407 - protein, 15 aa, synthetic construct
  REGION 1..15: note = Description of sequence: CDR3 from Table 6
CASSVAAGGAYEQYF

SEQ ID NO: 2408 - protein, 12 aa, synthetic construct
  REGION 1..12: note = Description of sequence: CDR3 from Table 6
CASRGPYNEQFF

SEQ ID NO: 2409 - protein, 11 aa, synthetic construct
  REGION 1..11: note = Description of sequence: CDR3 from Table 6
CASSLATEQFF

SEQ ID NO: 2410 - protein, 15 aa, synthetic construct
  REGION 1..15: note = Description of sequence: CDR3 from Table 6
CASSLESTANTEAFF

SEQ ID NO: 2411 - protein, 13 aa, synthetic construct
  REGION 1..13: note = Description of sequence: CDR3 from Table 6
CASNPGPTYGYTF

SEQ ID NO: 2412 - protein, 15 aa, synthetic construct
  REGION 1..15: note = Description of sequence: CDR3 from Table 6
CAIMSSGRADGELFF

SEQ ID NO: 2413 - protein, 12 aa, synthetic construct
  REGION 1..12: note = Description of sequence: CDR3 from Table 6
CASSQGSDEQYF

SEQ ID NO: 2414 - protein, 13 aa, synthetic construct
  REGION 1..13: note = Description of sequence: CDR3 from Table 6
CASSYGGAYEQYF

SEQ ID NO: 2415 - protein, 15 aa, synthetic construct
  REGION 1..15: note = Description of sequence: CDR3 from Table 6
CASSVDPGQSYEQYF

SEQ ID NO: 2416 - protein, 13 aa, synthetic construct
  REGION 1..13: note = Description of sequence: CDR3 from Table 6
CASSIVDGYEQYF

SEQ ID NO: 2417 - protein, 12 aa, synthetic construct
  REGION 1..12: note = Description of sequence: CDR3 from Table 6
CASSGFRGELFF

SEQ ID NO: 2418 - protein, 13 aa, synthetic construct
  REGION 1..13: note = Description of sequence: CDR3 from Table 6
CASSYGQGYEQYF

SEQ ID NO: 2419 - protein, 16 aa, synthetic construct
  REGION 1..16: note = Description of sequence: CDR3 from Table 6
CASSQVGGSYPREQFF

SEQ ID NO: 2420 - protein, 12 aa, synthetic construct
  REGION 1..12: note = Description of sequence: CDR3 from Table 6
CASSRGGHEQYF

SEQ ID NO: 2421 - protein, 13 aa, synthetic construct
  REGION 1..13: note = Description of sequence: CDR3 from Table 6
CASSDPNDYEQYF

SEQ ID NO: 2422 - protein, 14 aa, synthetic construct
  REGION 1..14: note = Description of sequence: CDR3 from Table 6
CASSIVGQGYEQYF

SEQ ID NO: 2423 - protein, 14 aa, synthetic construct
  REGION 1..14: note = Description of sequence: CDR3 from Table 6
CASSMGGVGTEAFF

SEQ ID NO: 2424 - protein, 13 aa, synthetic construct
  REGION 1..13: note = Description of sequence: CDR3 from Table 6
CASSPYSNQPQHF

SEQ ID NO: 2425 - protein, 14 aa, synthetic construct
  REGION 1..14: note = Description of sequence: CDR3 from Table 6
CASSFRDSSYEQYF

SEQ ID NO: 2426 - protein, 18 aa, synthetic construct
  REGION 1..18: note = Description of sequence: CDR3 from Table 6
CASSYSVKGQDYSYEQYF

SEQ ID NO: 2427 - protein, 16 aa, synthetic construct
  REGION 1..16: note = Description of sequence: CDR3 from Table 6
CASRLHGGTPSYEQYF

SEQ ID NO: 2428 - protein, 13 aa, synthetic construct
  REGION 1..13: note = Description of sequence: CDR3 from Table 6
CASSVEGSTEAFF

SEQ ID NO: 2429 - protein, 13 aa, synthetic construct
  REGION 1..13: note = Description of sequence: CDR3 from Table 6
CASSQAGGYEQYF

SEQ ID NO: 2430 - protein, 15 aa, synthetic construct
  REGION 1..15: note = Description of sequence: CDR3 from Table 6
CASTQPVDMNTEAFF

SEQ ID NO: 2431 - protein, 14 aa, synthetic construct
  REGION 1..14: note = Description of sequence: CDR3 from Table 6
CASSLYRGGDTQYF

SEQ ID NO: 2432 - protein, 14 aa, synthetic construct
  REGION 1..14: note = Description of sequence: CDR3 from Table 6
CASSSRLSQETQYF

SEQ ID NO: 2433 - protein, 14 aa, synthetic construct
  REGION 1..14: note = Description of sequence: CDR3 from Table 6
CASSVEGSGETQYF

SEQ ID NO: 2434 - protein, 14 aa, synthetic construct
  REGION 1..14: note = Description of sequence: CDR3 from Table 6
CASSVSQGGYEQYF

SEQ ID NO: 2435 - protein, 14 aa, synthetic construct
  REGION 1..14: note = Description of sequence: CDR3 from Table 6
CSAPGGSGANVLTF

SEQ ID NO: 2436 - protein, 16 aa, synthetic construct
  REGION 1..16: note = Description of sequence: CDR3 from Table 6
CASSNVLAGGRDTQYF

SEQ ID NO: 2437 - protein, 15 aa, synthetic construct
  REGION 1..15: note = Description of sequence: CDR3 from Table 6
CASSLGDRGPQPQHF

SEQ ID NO: 2438 - protein, 14 aa, synthetic construct
  REGION 1..14: note = Description of sequence: CDR3 from Table 6
CASTLAGGPYEQYF

SEQ ID NO: 2439 - protein, 13 aa, synthetic construct
  REGION 1..13: note = Description of sequence: CDR3 from Table 6
CASTGTDSYEQYF

SEQ ID NO: 2440 - protein, 11 aa, synthetic construct
  REGION 1..11: note = Description of sequence: CDR3 from Table 6
CASSNQETQYF

SEQ ID NO: 2441 - protein, 13 aa, synthetic construct
  REGION 1..13: note = Description of sequence: CDR3 from Table 6
CSVRTPSSYEQYF

SEQ ID NO: 2442 - protein, 14 aa, synthetic construct
  REGION 1..14: note = Description of sequence: CDR3 from Table 6
CASSQVPGGYEQYF

SEQ ID NO: 2443 - protein, 16 aa, synthetic construct
  REGION 1..16: note = Description of sequence: CDR3 from Table 6
CASRMGTSGSTDTQYF

SEQ ID NO: 2444 - protein, 16 aa, synthetic construct
  REGION 1..16: note = Description of sequence: CDR3 from Table 6
CSALGLAGGQGGELFF

SEQ ID NO: 2445 - protein, 10 aa, synthetic construct
  REGION 1..10: note = Description of sequence: CDR3 from Table 6
CSAGVYEQYF

SEQ ID NO: 2446 - protein, 15 aa, synthetic construct
  REGION 1..15: note = Description of sequence: CDR3 from Table 6
CASSVWDSLTGELFF

SEQ ID NO: 2447 - protein, 12 aa, synthetic construct
  REGION 1..12: note = Description of sequence: CDR3 from Table 6
CASSWDNGGYTF

SEQ ID NO: 2448 - protein, 13 aa, synthetic construct
  REGION 1..13: note = Description of sequence: CDR3 from Table 6
CASSVGSQETQYF

SEQ ID NO: 2449 - protein, 15 aa, synthetic construct
  REGION 1..15: note = Description of sequence: CDR3 from Table 6
CASILGLTTYNEQFF

SEQ ID NO: 2450 - protein, 14 aa, synthetic construct
  REGION 1..14: note = Description of sequence: CDR3 from Table 6
CASSWTGAGYEQYF

SEQ ID NO: 2451 - protein, 11 aa, synthetic construct
  REGION 1..11: note = Description of sequence: CDR3 from Table 6
CASSLGETQYF

SEQ ID NO: 2452 - protein, 14 aa, synthetic construct
  REGION 1..14: note = Description of sequence: CDR3 from Table 6
CASRYREGVEKLFF

SEQ ID NO: 2453 - protein, 15 aa, synthetic construct
  REGION 1..15: note = Description of sequence: CDR3 from Table 6
CASSYSGPTGYEQYF

SEQ ID NO: 2454 - protein, 15 aa, synthetic construct
  REGION 1..15: note = Description of sequence: CDR3 from Table 6
CASSLNREGNTEAFF

SEQ ID NO: 2455 - protein, 15 aa, synthetic construct
  REGION 1..15: note = Description of sequence: CDR3 from Table 6
CASSYEGALSYEQYF

SEQ ID NO: 2456 - protein, 14 aa, synthetic construct
  REGION 1..14: note = Description of sequence: CDR3 from Table 6
CSAREGLAAGELFF

SEQ ID NO: 2457 - protein, 15 aa, synthetic construct
  REGION 1..15: note = Description of sequence: CDR3 from Table 6
CASSPGQGLAYEQYF

SEQ ID NO: 2458 - protein, 13 aa, synthetic construct
  REGION 1..13: note = Description of sequence: CDR3 from Table 6
CASRDSLTGELFF

SEQ ID NO: 2459 - protein, 14 aa, synthetic construct
  REGION 1..14: note = Description of sequence: CDR3 from Table 6
CASSPSGGSYGYTF

SEQ ID NO: 2460 - protein, 14 aa, synthetic construct
  REGION 1..14: note = Description of sequence: CDR3 from Table 6
CASSISTSGYEQFF

SEQ ID NO: 2461 - protein, 14 aa, synthetic construct
  REGION 1..14: note = Description of sequence: CDR3 from Table 6
CASSYSNGGYGYTF

SEQ ID NO: 2462 - protein, 14 aa, synthetic construct
  REGION 1..14: note = Description of sequence: CDR3 from Table 6
CASSFWTSGGEQYF

SEQ ID NO: 2463 - protein, 15 aa, synthetic construct
  REGION 1..15: note = Description of sequence: CDR3 from Table 6
CAISERWDGYNEQFF

SEQ ID NO: 2464 - protein, 12 aa, synthetic construct
  REGION 1..12: note = Description of sequence: CDR3 from Table 6
CASSFLGDEQFF

SEQ ID NO: 2465 - protein, 15 aa, synthetic construct
  REGION 1..15: note = Description of sequence: CDR3 from Table 6
CATSRDLGGQQPQHF

SEQ ID NO: 2466 - protein, 13 aa, synthetic construct
  REGION 1..13: note = Description of sequence: CDR3 from Table 6
CASSVGEGTEAFF

SEQ ID NO: 2467 - protein, 14 aa, synthetic construct
  REGION 1..14: note = Description of sequence: CDR3 from Table 6
CASTATFGVTEAFF

SEQ ID NO: 2468 - protein, 13 aa, synthetic construct
  REGION 1..13: note = Description of sequence: CDR3 from Table 6
CASSYSLAAEAFF

SEQ ID NO: 2469 - protein, 12 aa, synthetic construct
  REGION 1..12: note = Description of sequence: CDR3 from Table 6
CASSLTGSEQYF

SEQ ID NO: 2470 - protein, 13 aa, synthetic construct
  REGION 1..13: note = Description of sequence: CDR3 from Table 6
CASSGELGSPLHF

SEQ ID NO: 2471 - protein, 11 aa, synthetic construct
  REGION 1..11: note = Description of sequence: CDR3 from Table 6
CASSSLGEQFF

SEQ ID NO: 2472 - protein, 11 aa, synthetic construct
  REGION 1..11: note = Description of sequence: CDR3 from Table 6
CASTDTGELFF

SEQ ID NO: 2473 - protein, 17 aa, synthetic construct
  REGION 1..17: note = Description of sequence: CDR3 from Table 6
CSVEGPGGRIANTEAFF

SEQ ID NO: 2474 - protein, 13 aa, synthetic construct
  REGION 1..13: note = Description of sequence: CDR3 from Table 6
CASSARGYDEQFF

SEQ ID NO: 2475 - protein, 13 aa, synthetic construct
  REGION 1..13: note = Description of sequence: CDR3 from Table 6
CSARASGAYEQYF

SEQ ID NO: 2476 - protein, 13 aa, synthetic construct
  REGION 1..13: note = Description of sequence: CDR3 from Table 6
CASSYANGYEQYF

SEQ ID NO: 2477 - protein, 13 aa, synthetic construct
  REGION 1..13: note = Description of sequence: CDR3 from Table 6
CASSWGGGYEQYF

SEQ ID NO: 2478 - protein, 12 aa, synthetic construct
  REGION 1..12: note = Description of sequence: CDR3 from Table 6
CASNQGLYEQYF

SEQ ID NO: 2479 - protein, 15 aa, synthetic construct
  REGION 1..15: note = Description of sequence: CDR3 from Table 6
CASSIAQGGNQPQHF

SEQ ID NO: 2480 - protein, 14 aa, synthetic construct
  REGION 1..14: note = Description of sequence: CDR3 from Table 6
CASSRQPMNTEAFF

SEQ ID NO: 2481 - protein, 12 aa, synthetic construct
  REGION 1..12: note = Description of sequence: CDR3 from Table 6
CASSYSLEGYTF

SEQ ID NO: 2482 - protein, 14 aa, synthetic construct
  REGION 1..14: note = Description of sequence: CDR3 from Table 6
CSARVTSGSYEQYF

SEQ ID NO: 2483 - protein, 13 aa, synthetic construct
  REGION 1..13: note = Description of sequence: CDR3 from Table 6
CSVGTYSNQPQHF

SEQ ID NO: 2484 - protein, 13 aa, synthetic construct
  REGION 1..13: note = Description of sequence: CDR3 from Table 6
CASSEGGYTEAFF

SEQ ID NO: 2485 - protein, 13 aa, synthetic construct
  REGION 1..13: note = Description of sequence: CDR3 from Table 6
CASSPGDGTEAFF

SEQ ID NO: 2486 - protein, 16 aa, synthetic construct
  REGION 1..16: note = Description of sequence: CDR3 from Table 6
CASSLPPADMRDTQYF

SEQ ID NO: 2487 - protein, 9 aa, synthetic construct
  REGION 1..9: note = Description of sequence: CDR3 from Table 6
CSSVTEAFF

SEQ ID NO: 2488 - protein, 13 aa, synthetic construct
  REGION 1..13: note = Description of sequence: CDR3 from Table 6
CASSQDRGNEQFF

SEQ ID NO: 2489 - protein, 12 aa, synthetic construct
  REGION 1..12: note = Description of sequence: CDR3 from Table 6
CASSFGSGEQFF

SEQ ID NO: 2490 - protein, 13 aa, synthetic construct
  REGION 1..13: note = Description of sequence: CDR3 from Table 6
CASSQAHTGELFF

SEQ ID NO: 2491 - protein, 16 aa, synthetic construct
  REGION 1..16: note = Description of sequence: CDR3 from Table 6
CASSQDRDSGYYEQYF

SEQ ID NO: 2492 - protein, 13 aa, synthetic construct
  REGION 1..13: note = Description of sequence: CDR3 from Table 6
CASSYSSGYFLFF

SEQ ID NO: 2493 - protein, 13 aa, synthetic construct
  REGION 1..13: note = Description of sequence: CDR3 from Table 6
CASSPSTGYGYTF

SEQ ID NO: 2494 - protein, 12 aa, synthetic construct
  REGION 1..12: note = Description of sequence: CDR3 from Table 6
CASSTGNYGYTF

SEQ ID NO: 2495 - protein, 15 aa, synthetic construct
  REGION 1..15: note = Description of sequence: CDR3 from Table 6
CASSLIQGAVDTQYF

SEQ ID NO: 2496 - protein, 13 aa, synthetic construct
  REGION 1..13: note = Description of sequence: CDR3 from Table 6
CASSFGQGYEQYF

SEQ ID NO: 2497 - protein, 13 aa, synthetic construct
  REGION 1..13: note = Description of sequence: CDR3 from Table 6
CASSPWTLNEQYF

SEQ ID NO: 2498 - protein, 13 aa, synthetic construct
  REGION 1..13: note = Description of sequence: CDR3 from Table 6
CASSYGNTGELFF

SEQ ID NO: 2499 - protein, 15 aa, synthetic construct
  REGION 1..15: note = Description of sequence: CDR3 from Table 6
CASSYSDRSSYEQYF

SEQ ID NO: 2500 - protein, 13 aa, synthetic construct
  REGION 1..13: note = Description of sequence: CDR3 from Table 6
CASSYGGGYEQYF

SEQ ID NO: 2501 - protein, 14 aa, synthetic construct
  REGION 1..14: note = Description of sequence: CDR3 from Table 6
CASREGLEDTEAFF

SEQ ID NO: 2502 - protein, 13 aa, synthetic construct
  REGION 1..13: note = Description of sequence: CDR3 from Table 6
CASTEGQGGEQYF

SEQ ID NO: 2503 - protein, 9 aa, synthetic construct
  REGION 1..9: note = Description of sequence: CDR3 from Table 6
CSPGDGYTF

SEQ ID NO: 2504 - protein, 14 aa, synthetic construct
  REGION 1..14: note = Description of sequence: CDR3 from Table 6
CASSPRDRVHEQYF

SEQ ID NO: 2505 - protein, 15 aa, synthetic construct
  REGION 1..15: note = Description of sequence: CDR3 from Table 6
CASSQGGGGTDTQYF

SEQ ID NO: 2506 - protein, 13 aa, synthetic construct
  REGION 1..13: note = Description of sequence: CDR3 from Table 6
CASSPSPGSEQYF

SEQ ID NO: 2507 - protein, 13 aa, synthetic construct
  REGION 1..13: note = Description of sequence: CDR3 from Table 6
CASSDWGGETQYF

SEQ ID NO: 2508 - protein, 11 aa, synthetic construct
  REGION 1..11: note = Description of sequence: CDR3 from Table 6
CSWDFQETQYF

SEQ ID NO: 2509 - protein, 12 aa, synthetic construct
  REGION 1..12: note = Description of sequence: CDR3 from Table 6
CASSENTGELFF

SEQ ID NO: 2510 - protein, 14 aa, synthetic construct
  REGION 1..14: note = Description of sequence: CDR3 from Table 6
CSGLVPGFDSPLHF

SEQ ID NO: 2511 - protein, 15 aa, synthetic construct
  REGION 1..15: note = Description of sequence: CDR3 from Table 6
CASSVDGGPQETQYF

SEQ ID NO: 2512 - protein, 14 aa, synthetic construct
  REGION 1..14: note = Description of sequence: CDR3 from Table 6
CASSFGGSSYEQYF

SEQ ID NO: 2513 - protein, 14 aa, synthetic construct
  REGION 1..14: note = Description of sequence: CDR3 from Table 6
CASSVGTSSYGYTF

SEQ ID NO: 2514 - protein, 13 aa, synthetic construct
  REGION 1..13: note = Description of sequence: CDR3 from Table 6
CASSLGTLNEQFF

SEQ ID NO: 2515 - protein, 13 aa, synthetic construct
  REGION 1..13: note = Description of sequence: CDR3 from Table 6
CASSNARGYGYTF

SEQ ID NO: 2516 - protein, 13 aa, synthetic construct
  REGION 1..13: note = Description of sequence: CDR3 from Table 6
CASSWWLNTEAFF

SEQ ID NO: 2517 - protein, 14 aa, synthetic construct
  REGION 1..14: note = Description of sequence: CDR3 from Table 6
CASSPAGSNYGYTF

SEQ ID NO: 2518 - protein, 11 aa, synthetic construct
  REGION 1..11: note = Description of sequence: CDR3 from Table 6
CASSLGAEQYF

SEQ ID NO: 2519 - protein, 12 aa, synthetic construct
  REGION 1..12: note = Description of sequence: CDR3 from Table 6
CASSPGLYTQYF

SEQ ID NO: 2520 - protein, 13 aa, synthetic construct
  REGION 1..13: note = Description of sequence: CDR3 from Table 6
CASSYSSGTEAFF

SEQ ID NO: 2521 - protein, 13 aa, synthetic construct
  REGION 1..13: note = Description of sequence: CDR3 from Table 6
CASSLREAGELFF

SEQ ID NO: 2522 - protein, 12 aa, synthetic construct
  REGION 1..12: note = Description of sequence: CDR3 from Table 6
CASSLGNTEAFF

SEQ ID NO: 2523 - protein, 15 aa, synthetic construct
  REGION 1..15: note = Description of sequence: CDR3 from Table 6
CASSEVQGGRDTQYF

SEQ ID NO: 2524 - protein, 12 aa, synthetic construct
  REGION 1..12: note = Description of sequence: CDR3 from Table 6
CASSFGIGPQYF

SEQ ID NO: 2525 - protein, 16 aa, synthetic construct
  REGION 1..16: note = Description of sequence: CDR3 from Table 6
CASSLWGQGWTGELFF

SEQ ID NO: 2526 - protein, 12 aa, synthetic construct
  REGION 1..12: note = Description of sequence: CDR3 from Table 6
CAWSVGNYGYTF

SEQ ID NO: 2527 - protein, 13 aa, synthetic construct
  REGION 1..13: note = Description of sequence: CDR3 from Table 6
CASSRPLNQPQHF

SEQ ID NO: 2528 - protein, 12 aa, synthetic construct
  REGION 1..12: note = Description of sequence: CDR3 from Table 6
CASSVESGEQYF

SEQ ID NO: 2529 - protein, 13 aa, synthetic construct
  REGION 1..13: note = Description of sequence: CDR3 from Table 6
CASSFSATGELFF

SEQ ID NO: 2530 - protein, 11 aa, synthetic construct
  REGION 1..11: note = Description of sequence: CDR3 from Table 6
CASSLAYEQYF

SEQ ID NO: 2531 - protein, 14 aa, synthetic construct
  REGION 1..14: note = Description of sequence: CDR3 from Table 6
CASSFGANTGELFF

SEQ ID NO: 2532 - protein, 14 aa, synthetic construct
  REGION 1..14: note = Description of sequence: CDR3 from Table 6
CASSEDRGNSPLHF

SEQ ID NO: 2533 - protein, 13 aa, synthetic construct
  REGION 1..13: note = Description of sequence: CDR3 from Table 7
CAVGFYGNNRLAF

SEQ ID NO: 2534 - protein, 10 aa, synthetic construct
  REGION 1..10: note = Description of sequence: CDR3 from Table 7
CAVRNNDMRF

SEQ ID NO: 2535 - protein, 17 aa, synthetic construct
  REGION 1..17: note = Description of sequence: CDR3 from Table 7
CALSEALAYNQGGKLIF

SEQ ID NO: 2536 - protein, 12 aa, synthetic construct
  REGION 1..12: note = Description of sequence: CDR3 from Table 7
CVVSGGYNKLIF

SEQ ID NO: 2537 - protein, 14 aa, synthetic construct
  REGION 1..14: note = Description of sequence: CDR3 from Table 7
CAMRDPFTGNQFYF

SEQ ID NO: 2538 - protein, 11 aa, synthetic construct
  REGION 1..11: note = Description of sequence: CDR3 from Table 7
CALRGYSTLTF

SEQ ID NO: 2539 - protein, 15 aa, synthetic construct
  REGION 1..15: note = Description of sequence: CDR3 from Table 7
CAMRELGGSNYKLTF

SEQ ID NO: 2540 - protein, 15 aa, synthetic construct
  REGION 1..15: note = Description of sequence: CDR3 from Table 7
CALSETDTGRRALTF

SEQ ID NO: 2541 - protein, 15 aa, synthetic construct
  REGION 1..15: note = Description of sequence: CDR3 from Table 7
CAMREFAGANSKLTF

SEQ ID NO: 2542 - protein, 10 aa, synthetic construct
  REGION 1..10: note = Description of sequence: CDR3 from Table 7
CAVNNARLMF

SEQ ID NO: 2543 - protein, 16 aa, synthetic construct
  REGION 1..16: note = Description of sequence: CDR3 from Table 7
CAASGQGGTSYGKLTF

SEQ ID NO: 2544 - protein, 14 aa, synthetic construct
  REGION 1..14: note = Description of sequence: CDR3 from Table 7
CAASGGNSGYALNF

SEQ ID NO: 2545 - protein, 12 aa, synthetic construct
  REGION 1..12: note = Description of sequence: CDR3 from Table 7
CVVRGSQGNLIF

SEQ ID NO: 2546 - protein, 15 aa, synthetic construct
  REGION 1..15: note = Description of sequence: CDR3 from Table 7
CAASALSGANSKLTF

SEQ ID NO: 2547 - protein, 14 aa, synthetic construct
  REGION 1..14: note = Description of sequence: CDR3 from Table 7
CAVRETNPKGKLIF

SEQ ID NO: 2548 - protein, 14 aa, synthetic construct
  REGION 1..14: note = Description of sequence: CDR3 from Table 7
CALSEVNRDDKIIF

SEQ ID NO: 2549 - protein, 13 aa, synthetic construct
  REGION 1..13: note = Description of sequence: CDR3 from Table 7
CAMRELDGQKLLF

SEQ ID NO: 2550 - protein, 17 aa, synthetic construct
  REGION 1..17: note = Description of sequence: CDR3 from Table 7
CALSEANYGGSQGNLIF

SEQ ID NO: 2551 - protein, 14 aa, synthetic construct
  REGION 1..14: note = Description of sequence: CDR3 from Table 7
CAVRGLTGANNLFF

SEQ ID NO: 2552 - protein, 13 aa, synthetic construct
  REGION 1..13: note = Description of sequence: CDR3 from Table 7
CAFMMDNNNDMRF

SEQ ID NO: 2553 - protein, 14 aa, synthetic construct
  REGION 1..14: note = Description of sequence: CDR3 from Table 7
CVVTPTDSWGKLQF

SEQ ID NO: 2554 - protein, 15 aa, synthetic construct
  REGION 1..15: note = Description of sequence: CDR3 from Table 7
CALSEGQTGANNLFF

SEQ ID NO: 2555 - protein, 14 aa, synthetic construct
  REGION 1..14: note = Description of sequence: CDR3 from Table 7
CAESRPEYGNKLVF

SEQ ID NO: 2556 - protein, 16 aa, synthetic construct
  REGION 1..16: note = Description of sequence: CDR3 from Table 7
CAMRAYSGGGADGLTF

SEQ ID NO: 2557 - protein, 11 aa, synthetic construct
  REGION 1..11: note = Description of sequence: CDR3 from Table 7
CAPPGAQKLVF

SEQ ID NO: 2558 - protein, 12 aa, synthetic construct
  REGION 1..12: note = Description of sequence: CDR3 from Table 7
CAMTITGNQFYF

SEQ ID NO: 2559 - protein, 15 aa, synthetic construct
  REGION 1..15: note = Description of sequence: CDR3 from Table 7
CALSEAGSGNTPLVF

SEQ ID NO: 2560 - protein, 14 aa, synthetic construct
  REGION 1..14: note = Description of sequence: CDR3 from Table 7
CALIRNSGNTPLVF

SEQ ID NO: 2561 - protein, 13 aa, synthetic construct
  REGION 1..13: note = Description of sequence: CDR3 from Table 7
CATEDYNTDKLIF

SEQ ID NO: 2562 - protein, 13 aa, synthetic construct
  REGION 1..13: note = Description of sequence: CDR3 from Table 7
CAMRELNFNKFYF

SEQ ID NO: 2563 - protein, 11 aa, synthetic construct
  REGION 1..11: note = Description of sequence: CDR3 from Table 7
CAYHDNNDMRF

SEQ ID NO: 2564 - protein, 14 aa, synthetic construct
  REGION 1..14: note = Description of sequence: CDR3 from Table 7
CAASAMDSSYKLIF

SEQ ID NO: 2565 - protein, 15 aa, synthetic construct
  REGION 1..15: note = Description of sequence: CDR3 from Table 7
CALSEAEYNFNKFYF

SEQ ID NO: 2566 - protein, 15 aa, synthetic construct
  REGION 1..15: note = Description of sequence: CDR3 from Table 7
CAGQSRYNRDDKIIF

SEQ ID NO: 2567 - protein, 12 aa, synthetic construct
  REGION 1..12: note = Description of sequence: CDR3 from Table 7
CAAAAGANNLFF

SEQ ID NO: 2568 - protein, 12 aa, synthetic construct
  REGION 1..12: note = Description of sequence: CDR3 from Table 7
CAGGSNDYKLSF

SEQ ID NO: 2569 - protein, 14 aa, synthetic construct
  REGION 1..14: note = Description of sequence: CDR3 from Table 7
CAVSFYNQGGKLIF

SEQ ID NO: 2570 - protein, 13 aa, synthetic construct
  REGION 1..13: note = Description of sequence: CDR3 from Table 7
CAVNAPDTDKLIF

SEQ ID NO: 2571 - protein, 14 aa, synthetic construct
  REGION 1..14: note = Description of sequence: CDR3 from Table 7
CAVVNSNSGYALNF

SEQ ID NO: 2572 - protein, 14 aa, synthetic construct
  REGION 1..14: note = Description of sequence: CDR3 from Table 7
CAVLLNNAGNMLTF

SEQ ID NO: 2573 - protein, 14 aa, synthetic construct
  REGION 1..14: note = Description of sequence: CDR3 from Table 7
CAVSGGYRDDKIIF

SEQ ID NO: 2574 - protein, 16 aa, synthetic construct
  REGION 1..16: note = Description of sequence: CDR3 from Table 7
CIVRDWANFGNEKLTF

SEQ ID NO: 2575 - protein, 14 aa, synthetic construct
  REGION 1..14: note = Description of sequence: CDR3 from Table 7
CILTMGTSYDKVIF

SEQ ID NO: 2576 - protein, 14 aa, synthetic construct
  REGION 1..14: note = Description of sequence: CDR3 from Table 7
CAVNEATGRRALTF

SEQ ID NO: 2577 - protein, 13 aa, synthetic construct
  REGION 1..13: note = Description of sequence: CDR3 from Table 7
CAVDPNTGNQFYF

SEQ ID NO: 2578 - protein, 13 aa, synthetic construct
  REGION 1..13: note = Description of sequence: CDR3 from Table 7
CAADTSGTYKYIF

SEQ ID NO: 2579 - protein, 11 aa, synthetic construct
  REGION 1..11: note = Description of sequence: CDR3 from Table 7
CAATRDYKLSF

SEQ ID NO: 2580 - protein, 14 aa, synthetic construct
  REGION 1..14: note = Description of sequence: CDR3 from Table 7
CALAGWEYGNKLVF

SEQ ID NO: 2581 - protein, 14 aa, synthetic construct
  REGION 1..14: note = Description of sequence: CDR3 from Table 7
CVVNINSGNTPLVF

SEQ ID NO: 2582 - protein, 14 aa, synthetic construct
  REGION 1..14: note = Description of sequence: CDR3 from Table 7
CAAEGNTGGFKTIF

SEQ ID NO: 2583 - protein, 12 aa, synthetic construct
  REGION 1..12: note = Description of sequence: CDR3 from Table 7
CAAETSGSRLTF

SEQ ID NO: 2584 - protein, 14 aa, synthetic construct
  REGION 1..14: note = Description of sequence: CDR3 from Table 7
CAVIDGAGSYQLTF

SEQ ID NO: 2585 - protein, 13 aa, synthetic construct
  REGION 1..13: note = Description of sequence: CDR3 from Table 7
CAVFSGGYQKVTF

SEQ ID NO: 2586 - protein, 16 aa, synthetic construct
  REGION 1..16: note = Description of sequence: CDR3 from Table 7
CALRLSSGGSNYKLTF

SEQ ID NO: 2587 - protein, 13 aa, synthetic construct
  REGION 1..13: note = Description of sequence: CDR3 from Table 7
CAAERGNNARLMF

SEQ ID NO: 2588 - protein, 15 aa, synthetic construct
  REGION 1..15: note = Description of sequence: CDR3 from Table 7
CAVNPLEGGYNKLIF

SEQ ID NO: 2589 - protein, 13 aa, synthetic construct
  REGION 1..13: note = Description of sequence: CDR3 from Table 7
CATDRNAPYALNF

SEQ ID NO: 2590 - protein, 12 aa, synthetic construct
  REGION 1..12: note = Description of sequence: CDR3 from Table 7
CATDEGNTPLVF

SEQ ID NO: 2591 - protein, 14 aa, synthetic construct
  REGION 1..14: note = Description of sequence: CDR3 from Table 7
CAVDGGEYGNKLVF

SEQ ID NO: 2592 - protein, 13 aa, synthetic construct
  REGION 1..13: note = Description of sequence: CDR3 from Table 7
CATDDTGGFKTIF

SEQ ID NO: 2593 - protein, 9 aa, synthetic construct
  REGION 1..9: note = Description of sequence: CDR3 from Table 7
CAYNPDMRF

SEQ ID NO: 2594 - protein, 14 aa, synthetic construct
  REGION 1..14: note = Description of sequence: CDR3 from Table 7
CVVSLHTGGFKTIF

SEQ ID NO: 2595 - protein, 12 aa, synthetic construct
  REGION 1..12: note = Description of sequence: CDR3 from Table 7
CAENVTGNQFYF

SEQ ID NO: 2596 - protein, 13 aa, synthetic construct
  REGION 1..13: note = Description of sequence: CDR3 from Table 7
CASKRGGADGLTF

SEQ ID NO: 2597 - protein, 9 aa, synthetic construct
  REGION 1..9: note = Description of sequence: CDR3 from Table 7
CAYSPPLVF

SEQ ID NO: 2598 - protein, 13 aa, synthetic construct
  REGION 1..13: note = Description of sequence: CDR3 from Table 7
CAFAPGNNNDMRF

SEQ ID NO: 2599 - protein, 12 aa, synthetic construct
  REGION 1..12: note = Description of sequence: CDR3 from Table 7
CAYFPYGQNFVF

SEQ ID NO: 2600 - protein, 14 aa, synthetic construct
  REGION 1..14: note = Description of sequence: CDR3 from Table 7
CAMRVSDNFNKFYF

SEQ ID NO: 2601 - protein, 15 aa, synthetic construct
  REGION 1..15: note = Description of sequence: CDR3 from Table 7
CAESPSNFGNEKLTF

SEQ ID NO: 2602 - protein, 14 aa, synthetic construct
  REGION 1..14: note = Description of sequence: CDR3 from Table 7
CAENPCSNDYKLSF

SEQ ID NO: 2603 - protein, 12 aa, synthetic construct
  REGION 1..12: note = Description of sequence: CDR3 from Table 7
CAVTSNTGKLIF

SEQ ID NO: 2604 - protein, 15 aa, synthetic construct
  REGION 1..15: note = Description of sequence: CDR3 from Table 7
CAMREDYSSASKIIF

SEQ ID NO: 2605 - protein, 14 aa, synthetic construct
  REGION 1..14: note = Description of sequence: CDR3 from Table 7
CAMALGNTGNQFYF

SEQ ID NO: 2606 - protein, 13 aa, synthetic construct
  REGION 1..13: note = Description of sequence: CDR3 from Table 7
CAASGGGADGLTF

SEQ ID NO: 2607 - protein, 14 aa, synthetic construct
  REGION 1..14: note = Description of sequence: CDR3 from Table 7
CAGYSGGGADGLTF

SEQ ID NO: 2608 - protein, 10 aa, synthetic construct
  REGION 1..10: note = Description of sequence: CDR3 from Table 7
CAVNGNQFYF

SEQ ID NO: 2609 - protein, 10 aa, synthetic construct
  REGION 1..10: note = Description of sequence: CDR3 from Table 7
CEGNNNDMRF

SEQ ID NO: 2610 - protein, 10 aa, synthetic construct
  REGION 1..10: note = Description of sequence: CDR3 from Table 7
CAVAHARLMF

SEQ ID NO: 2611 - protein, 13 aa, synthetic construct
  REGION 1..13: note = Description of sequence: CDR3 from Table 7
CAVGVEYGNKLVF

SEQ ID NO: 2612 - protein, 12 aa, synthetic construct
  REGION 1..12: note = Description of sequence: CDR3 from Table 7
CAFSQYGNKLVF

SEQ ID NO: 2613 - protein, 13 aa, synthetic construct
  REGION 1..13: note = Description of sequence: CDR3 from Table 7
CAASIDRDDKIIF

SEQ ID NO: 2614 - protein, 15 aa, synthetic construct
  REGION 1..15: note = Description of sequence: CDR3 from Table 7
CALTTDSNSGYALNF

SEQ ID NO: 2615 - protein, 12 aa, synthetic construct
  REGION 1..12: note = Description of sequence: CDR3 from Table 7
CATSQMGDTQYF

SEQ ID NO: 2616 - protein, 16 aa, synthetic construct
  REGION 1..16: note = Description of sequence: CDR3 from Table 7
CASSPFGDMLYNEQFF

SEQ ID NO: 2617 - protein, 12 aa, synthetic construct
  REGION 1..12: note = Description of sequence: CDR3 from Table 7
CAARPASYEQYF

SEQ ID NO: 2618 - protein, 16 aa, synthetic construct
  REGION 1..16: note = Description of sequence: CDR3 from Table 7
CASSSSGRASADTQYF

SEQ ID NO: 2619 - protein, 20 aa, synthetic construct
  REGION 1..20: note = Description of sequence: CDR3 from Table 7
CASSPNARLAGAGGTDTQYF

SEQ ID NO: 2620 - protein, 17 aa, synthetic construct
  REGION 1..17: note = Description of sequence: CDR3 from Table 7
CASSLAPKTAFSYEQYF

SEQ ID NO: 2621 - protein, 14 aa, synthetic construct
  REGION 1..14: note = Description of sequence: CDR3 from Table 7
CSARSWTPQETQYF

SEQ ID NO: 2622 - protein, 14 aa, synthetic construct
  REGION 1..14: note = Description of sequence: CDR3 from Table 7
CSVEGLRGGNEQFF

SEQ ID NO: 2623 - protein, 14 aa, synthetic construct
  REGION 1..14: note = Description of sequence: CDR3 from Table 7
CASSLGGLTDTQYF

SEQ ID NO: 2624 - protein, 10 aa, synthetic construct
  REGION 1..10: note = Description of sequence: CDR3 from Table 7
CAWSAGEQYF

SEQ ID NO: 2625 - protein, 13 aa, synthetic construct
  REGION 1..13: note = Description of sequence: CDR3 from Table 7
CASSYGGGSPQYF

SEQ ID NO: 2626 - protein, 13 aa, synthetic construct
  REGION 1..13: note = Description of sequence: CDR3 from Table 7
CASSWTGNTEAFF

SEQ ID NO: 2627 - protein, 14 aa, synthetic construct
  REGION 1..14: note = Description of sequence: CDR3 from Table 7
CASSPLRGPYEQYF

SEQ ID NO: 2628 - protein, 14 aa, synthetic construct
  REGION 1..14: note = Description of sequence: CDR3 from Table 7
CSATPRYRGYEQYF

SEQ ID NO: 2629 - protein, 14 aa, synthetic construct
  REGION 1..14: note = Description of sequence: CDR3 from Table 7
CASAGPGRNQPQHF

SEQ ID NO: 2630 - protein, 14 aa, synthetic construct
  REGION 1..14: note = Description of sequence: CDR3 from Table 7
CASSQGSGANVLTF

SEQ ID NO: 2631 - protein, 15 aa, synthetic construct
  REGION 1..15: note = Description of sequence: CDR3 from Table 7
CASYPISRASYEQYF

SEQ ID NO: 2632 - protein, 13 aa, synthetic construct
  REGION 1..13: note = Description of sequence: CDR3 from Table 7
CASSQDQNTEAFF

SEQ ID NO: 2633 - protein, 15 aa, synthetic construct
  REGION 1..15: note = Description of sequence: CDR3 from Table 7
CASSGQGHPYNEQFF

SEQ ID NO: 2634 - protein, 14 aa, synthetic construct
  REGION 1..14: note = Description of sequence: CDR3 from Table 7
CASSPMGQSYEQYF

SEQ ID NO: 2635 - protein, 19 aa, synthetic construct
  REGION 1..19: note = Description of sequence: CDR3 from Table 7
CASSTGGTSGGRNTGELFF

SEQ ID NO: 2636 - protein, 13 aa, synthetic construct
  REGION 1..13: note = Description of sequence: CDR3 from Table 7
CSARGDPNYEQYF

SEQ ID NO: 2637 - protein, 13 aa, synthetic construct
  REGION 1..13: note = Description of sequence: CDR3 from Table 7
CASSPRAYNEQFF

SEQ ID NO: 2638 - protein, 13 aa, synthetic construct
  REGION 1..13: note = Description of sequence: CDR3 from Table 7
CASSGQGGDEQYF

SEQ ID NO: 2639 - protein, 15 aa, synthetic construct
  REGION 1..15: note = Description of sequence: CDR3 from Table 7
CASSVGGGSSYEQYF

SEQ ID NO: 2640 - protein, 16 aa, synthetic construct
  REGION 1..16: note = Description of sequence: CDR3 from Table 7
CASSVASGGYTDTQYF

SEQ ID NO: 2641 - protein, 15 aa, synthetic construct
  REGION 1..15: note = Description of sequence: CDR3 from Table 7
CASSRSRWEFYGYTF

SEQ ID NO: 2642 - protein, 12 aa, synthetic construct
  REGION 1..12: note = Description of sequence: CDR3 from Table 7
CASNRGYNEQFF

SEQ ID NO: 2643 - protein, 17 aa, synthetic construct
  REGION 1..17: note = Description of sequence: CDR3 from Table 7
CASSQAERGESYNEQFF

SEQ ID NO: 2644 - protein, 16 aa, synthetic construct
  REGION 1..16: note = Description of sequence: CDR3 from Table 7
CASSLGGNPTYNEQFF

SEQ ID NO: 2645 - protein, 13 aa, synthetic construct
  REGION 1..13: note = Description of sequence: CDR3 from Table 7
CASRIPDRNEQFF

SEQ ID NO: 2646 - protein, 13 aa, synthetic construct
  REGION 1..13: note = Description of sequence: CDR3 from Table 7
CAWSAGGTGELFF

SEQ ID NO: 2647 - protein, 12 aa, synthetic construct
  REGION 1..12: note = Description of sequence: CDR3 from Table 7
CAWMGSYNEQFF

SEQ ID NO: 2648 - protein, 13 aa, synthetic construct
  REGION 1..13: note = Description of sequence: CDR3 from Table 7
CASSLQGSYEQYF

SEQ ID NO: 2649 - protein, 15 aa, synthetic construct
  REGION 1..15: note = Description of sequence: CDR3 from Table 7
CSARPGLAGGYEQYF

SEQ ID NO: 2650 - protein, 13 aa, synthetic construct
  REGION 1..13: note = Description of sequence: CDR3 from Table 7
CASSYQTGNEQFF

SEQ ID NO: 2651 - protein, 15 aa, synthetic construct
  REGION 1..15: note = Description of sequence: CDR3 from Table 7
CASRGSGASTGELFF

SEQ ID NO: 2652 - protein, 13 aa, synthetic construct
  REGION 1..13: note = Description of sequence: CDR3 from Table 7
CASSGQGTDTQYF

SEQ ID NO: 2653 - protein, 14 aa, synthetic construct
  REGION 1..14: note = Description of sequence: CDR3 from Table 7
CASSLWAEPDTQYF

SEQ ID NO: 2654 - protein, 13 aa, synthetic construct
  REGION 1..13: note = Description of sequence: CDR3 from Table 7
CASSLGISYEQYF

SEQ ID NO: 2655 - protein, 13 aa, synthetic construct
  REGION 1..13: note = Description of sequence: CDR3 from Table 7
CASSQVTGYEQYF

SEQ ID NO: 2656 - protein, 15 aa, synthetic construct
  REGION 1..15: note = Description of sequence: CDR3 from Table 7
CASSQVSGGSYEQYF

SEQ ID NO: 2657 - protein, 15 aa, synthetic construct
  REGION 1..15: note = Description of sequence: CDR3 from Table 7
CASSQEPSGFYEQYF

SEQ ID NO: 2658 - protein, 12 aa, synthetic construct
  REGION 1..12: note = Description of sequence: CDR3 from Table 7
CASSQQGSEQYF

SEQ ID NO: 2659 - protein, 13 aa, synthetic construct
  REGION 1..13: note = Description of sequence: CDR3 from Table 7
CASSLGEDYEQYF

SEQ ID NO: 2660 - protein, 12 aa, synthetic construct
  REGION 1..12: note = Description of sequence: CDR3 from Table 7
CSVQGPYNEQFF

SEQ ID NO: 2661 - protein, 15 aa, synthetic construct
  REGION 1..15: note = Description of sequence: CDR3 from Table 7
CASSPGQGIDSPLHF

SEQ ID NO: 2662 - protein, 13 aa, synthetic construct
  REGION 1..13: note = Description of sequence: CDR3 from Table 7
CASSYSGGYEQYF

SEQ ID NO: 2663 - protein, 13 aa, synthetic construct
  REGION 1..13: note = Description of sequence: CDR3 from Table 7
CAWIRTGGYGYTF

SEQ ID NO: 2664 - protein, 13 aa, synthetic construct
  REGION 1..13: note = Description of sequence: CDR3 from Table 7
CASSPGGGYEQYF

SEQ ID NO: 2665 - protein, 13 aa, synthetic construct
  REGION 1..13: note = Description of sequence: CDR3 from Table 7
CASSFTVAGEQYF

SEQ ID NO: 2666 - protein, 13 aa, synthetic construct
  REGION 1..13: note = Description of sequence: CDR3 from Table 7
CASSYSGHNEQFF

SEQ ID NO: 2667 - protein, 13 aa, synthetic construct
  REGION 1..13: note = Description of sequence: CDR3 from Table 7
CASSYTIGNEQYF

SEQ ID NO: 2668 - protein, 14 aa, synthetic construct
  REGION 1..14: note = Description of sequence: CDR3 from Table 7
CAISDPDRGGRAFF

SEQ ID NO: 2669 - protein, 14 aa, synthetic construct
  REGION 1..14: note = Description of sequence: CDR3 from Table 7
CASTAGGGTDTQYF

SEQ ID NO: 2670 - protein, 15 aa, synthetic construct
  REGION 1..15: note = Description of sequence: CDR3 from Table 7
CASSYSPGAYTEAFF

SEQ ID NO: 2671 - protein, 13 aa, synthetic construct
  REGION 1..13: note = Description of sequence: CDR3 from Table 7
CSVWKENAFEQFF

SEQ ID NO: 2672 - protein, 13 aa, synthetic construct
  REGION 1..13: note = Description of sequence: CDR3 from Table 7
CASSQDTGYEQYF

SEQ ID NO: 2673 - protein, 10 aa, synthetic construct
  REGION 1..10: note = Description of sequence: CDR3 from Table 7
CASGLDTQYF

SEQ ID NO: 2674 - protein, 13 aa, synthetic construct
  REGION 1..13: note = Description of sequence: CDR3 from Table 7
CASSLTGVDGYTF

SEQ ID NO: 2675 - protein, 13 aa, synthetic construct
  REGION 1..13: note = Description of sequence: CDR3 from Table 7
CSAAYNTFGEQFF

SEQ ID NO: 2676 - protein, 12 aa, synthetic construct
  REGION 1..12: note = Description of sequence: CDR3 from Table 7
CSATSGTDTQYF

SEQ ID NO: 2677 - protein, 15 aa, synthetic construct
  REGION 1..15: note = Description of sequence: CDR3 from Table 7
CASSLGGFAGNTIYF

SEQ ID NO: 2678 - protein, 12 aa, synthetic construct
  REGION 1..12: note = Description of sequence: CDR3 from Table 7
CSSPGREGPQYF

SEQ ID NO: 2679 - protein, 13 aa, synthetic construct
  REGION 1..13: note = Description of sequence: CDR3 from Table 7
CASRGGDGETQYF

SEQ ID NO: 2680 - protein, 12 aa, synthetic construct
  REGION 1..12: note = Description of sequence: CDR3 from Table 7
CASGDSGALEFF

SEQ ID NO: 2681 - protein, 12 aa, synthetic construct
  REGION 1..12: note = Description of sequence: CDR3 from Table 7
CASSSAGTEAFF

SEQ ID NO: 2682 - protein, 15 aa, synthetic construct
  REGION 1..15: note = Description of sequence: CDR3 from Table 7
CASSQGGGGTDTQYF

SEQ ID NO: 2683 - protein, 12 aa, synthetic construct
  REGION 1..12: note = Description of sequence: CDR3 from Table 7
CATWDSGNIQYF

SEQ ID NO: 2684 - protein, 17 aa, synthetic construct
  REGION 1..17: note = Description of sequence: CDR3 from Table 7
CSATCNGTFLYQETQYF

SEQ ID NO: 2685 - protein, 18 aa, synthetic construct
  REGION 1..18: note = Description of sequence: CDR3 from Table 7
CASSQGPPGSGGGNEQFF

SEQ ID NO: 2686 - protein, 14 aa, synthetic construct
  REGION 1..14: note = Description of sequence: CDR3 from Table 7
CASSSLGDSYEQYF

SEQ ID NO: 2687 - protein, 12 aa, synthetic construct
  REGION 1..12: note = Description of sequence: CDR3 from Table 7
CASSLGGPGAFF

SEQ ID NO: 2688 - protein, 13 aa, synthetic construct
  REGION 1..13: note = Description of sequence: CDR3 from Table 7
CASSSDINYGYTF

SEQ ID NO: 2689 - protein, 13 aa, synthetic construct
  REGION 1..13: note = Description of sequence: CDR3 from Table 7
CASSYSSGYGYTF

SEQ ID NO: 2690 - protein, 9 aa, synthetic construct
  REGION 1..9: note = Description of sequence: Wildtype peptide from Table 8
VLVDDAHGL

SEQ ID NO: 2691 - protein, 9 aa, synthetic construct
  REGION 1..9: note = Description of sequence: Wildtype peptide from Table 8
YLDELIKNT

SEQ ID NO: 2692 - protein, 9 aa, synthetic construct
  REGION 1..9: note = Description of sequence: Wildtype peptide from Table 8
FLQSRGNEV

SEQ ID NO: 2693 - protein, 9 aa, synthetic construct
  REGION 1..9: note = Description of sequence: Wildtype peptide from Table 8
ILTDMEEKV

SEQ ID NO: 2694 - protein, 9 aa, synthetic construct
  REGION 1..9: note = Description of sequence: Wildtype peptide from Table 8
SMPDFDLHL

SEQ ID NO: 2695 - protein, 9 aa, synthetic construct
  REGION 1..9: note = Description of sequence: Wildtype peptide from Table 8
KLMNIQQQL

SEQ ID NO: 2696 - protein, 9 aa, synthetic construct
  REGION 1..9: note = Description of sequence: Wildtype peptide from Table 8
GMLPVDKPV

SEQ ID NO: 2697 - protein, 9 aa, synthetic construct
  REGION 1..9: note = Description of sequence: Wildtype peptide from Table 8
VQYLGMLPV

SEQ ID NO: 2698 - protein, 9 aa, synthetic construct
  REGION 1..9: note = Description of sequence: Wildtype peptide from Table 8
RLPHVEYEL

SEQ ID NO: 2699 - protein, 9 aa, synthetic construct
  REGION 1..9: note = Description of sequence: Wildtype peptide from Table 8
KLGASPLHV

SEQ ID NO: 2700 - protein, 9 aa, synthetic construct
  REGION 1..9: note = Description of sequence: Wildtype peptide from Table 8
ILNVDVFTL

SEQ ID NO: 2701 - protein, 9 aa, synthetic construct
  REGION 1..9: note = Description of sequence: Wildtype peptide from Table 8
FVYVFTTHL

SEQ ID NO: 2702 - protein, 9 aa, synthetic construct
  REGION 1..9: note = Description of sequence: Wildtype peptide from Table 8
FMLLTQARL

SEQ ID NO: 2703 - protein, 10 aa, synthetic construct
  REGION 1..10: note = Description of sequence: Wildtype peptide from Table 8
MLSILALVGV

SEQ ID NO: 2704 - protein, 9 aa, synthetic construct
  REGION 1..9: note = Description of sequence: Wildtype peptide from Table 8
ALSYTPVEV

SEQ ID NO: 2705 - protein, 10 aa, synthetic construct
  REGION 1..10: note = Description of sequence: Wildtype peptide from Table 8
NLMDGDLGLI

SEQ ID NO: 2706 - protein, 9 aa, synthetic construct
  REGION 1..9: note = Description of sequence: Wildtype peptide from Table 8
NLMDGDLGL

SEQ ID NO: 2707 - protein, 9 aa, synthetic construct
  REGION 1..9: note = Description of sequence: Wildtype peptide from Table 8
LMVLHSPSL

SEQ ID NO: 2708 - protein, 9 aa, synthetic construct
  REGION 1..9: note = Description of sequence: Wildtype peptide from Table 8
KLFEQILKA

SEQ ID NO: 2709 - protein, 9 aa, synthetic construct
  REGION 1..9: note = Description of sequence: Wildtype peptide from Table 8
YMLTLRTKL

SEQ ID NO: 2710 - protein, 9 aa, synthetic construct
  REGION 1..9: note = Description of sequence: Wildtype peptide from Table 8
GLTSFVIAI

SEQ ID NO: 2711 - protein, 9 aa, synthetic construct
  REGION 1..9: note = Description of sequence: Wildtype peptide from Table 8
FLSDHPYLV

SEQ ID NO: 2712 - protein, 9 aa, synthetic construct
  REGION 1..9: note = Description of sequence: Wildtype peptide from Table 8
YLFAIFSGL

SEQ ID NO: 2713 - protein, 9 aa, synthetic construct
  REGION 1..9: note = Description of sequence: Wildtype peptide from Table 8
KLNTITPVV

SEQ ID NO: 2714 - protein, 9 aa, synthetic construct
  REGION 1..9: note = Description of sequence: Wildtype peptide from Table 8
MLMFAVIVA

SEQ ID NO: 2715 - protein, 9 aa, synthetic construct
  REGION 1..9: note = Description of sequence: Wildtype peptide from Table 8
LLAGTLAGV

SEQ ID NO: 2716 - protein, 9 aa, synthetic construct
  REGION 1..9: note = Description of sequence: Wildtype peptide from Table 8
SLAPLSPRA

SEQ ID NO: 2717 - protein, 10 aa, synthetic construct
  REGION 1..10: note = Description of sequence: Wildtype peptide from Table 8
VLLGVKLSGV

SEQ ID NO: 2718 - protein, 9 aa, synthetic construct
  REGION 1..9: note = Description of sequence: Wildtype peptide from Table 8
TLFTIVGTV

SEQ ID NO: 2719 - protein, 9 aa, synthetic construct
  REGION 1..9: note = Description of sequence: Wildtype peptide from Table 8
LLAMKVPNV

SEQ ID NO: 2720 - protein, 9 aa, synthetic construct
  REGION 1..9: note = Description of sequence: Wildtype peptide from Table 8
LLAMKVPNV

SEQ ID NO: 2721 - protein, 10 aa, synthetic construct
  REGION 1..10: note = Description of sequence: Wildtype peptide from Table 8
FMTKINGLEV

SEQ ID NO: 2722 - protein, 9 aa, synthetic construct
  REGION 1..9: note = Description of sequence: Wildtype peptide from Table 8
FLNDLLSVM

SEQ ID NO: 2723 - protein, 9 aa, synthetic construct
  REGION 1..9: note = Description of sequence: Wildtype peptide from Table 8
GLMAIAWFI

SEQ ID NO: 2724 - protein, 9 aa, synthetic construct
  REGION 1..9: note = Description of sequence: Wildtype peptide from Table 8
FIISYVVAV

SEQ ID NO: 2725 - protein, 9 aa, synthetic construct
  REGION 1..9: note = Description of sequence: Wildtype peptide from Table 8
ALIHHNTHL

SEQ ID NO: 2726 - protein, 9 aa, synthetic construct
  REGION 1..9: note = Description of sequence: Wildtype peptide from Table 8
ILLDWAANV

SEQ ID NO: 2727 - protein, 9 aa, synthetic construct
  REGION 1..9: note = Description of sequence: Wildtype peptide from Table 8
ALFSELSPV

SEQ ID NO: 2728 - protein, 9 aa, synthetic construct
  REGION 1..9: note = Description of sequence: Wildtype peptide from Table 8
SLLEYYTEL

SEQ ID NO: 2729 - protein, 9 aa, synthetic construct
  REGION 1..9: note = Description of sequence: Wildtype peptide from Table 8
HIAKSPFEV

SEQ ID NO: 2730 - protein, 9 aa, synthetic construct
  REGION 1..9: note = Description of sequence: Wildtype peptide from Table 8
VVLSWAPPV

SEQ ID NO: 2731 - protein, 9 aa, synthetic construct
  REGION 1..9: note = Description of sequence: Wildtype peptide from Table 8
TAMDLFVTV

SEQ ID NO: 2732 - protein, 9 aa, synthetic construct
  REGION 1..9: note = Description of sequence: Wildtype peptide from Table 8
YVTAMDLFV

SEQ ID NO: 2733 - protein, 9 aa, synthetic construct
  REGION 1..9: note = Description of sequence: Wildtype peptide from Table 8
YVVTWIVGA

SEQ ID NO: 2734 - protein, 9 aa, synthetic construct
  REGION 1..9: note = Description of sequence: Wildtype peptide from Table 8
ALYGSVPVL

SEQ ID NO: 2735 - protein, 10 aa, synthetic construct
  REGION 1..10: note = Description of sequence: Wildtype peptide from Table 8
ALLETLSLLL

SEQ ID NO: 2736 - protein, 9 aa, synthetic construct
  REGION 1..9: note = Description of sequence: Wildtype peptide from Table 8
ALLETLSLL

SEQ ID NO: 2737 - protein, 9 aa, synthetic construct
  REGION 1..9: note = Description of sequence: Wildtype peptide from Table 8
LIFNMFYWI

SEQ ID NO: 2738 - protein, 9 aa, synthetic construct
  REGION 1..9: note = Description of sequence: Wildtype peptide from Table 8
SLDPTTSPV

SEQ ID NO: 2739 - protein, 9 aa, synthetic construct
  REGION 1..9: note = Description of sequence: Wildtype peptide from Table 8
KMSLANIYL

SEQ ID NO: 2740 - protein, 9 aa, synthetic construct
  REGION 1..9: note = Description of sequence: Wildtype peptide from Table 8
FSFPLDFLV

SEQ ID NO: 2741 - protein, 9 aa, synthetic construct
  REGION 1..9: note = Description of sequence: Wildtype peptide from Table 8
FLQEYTVKL

SEQ ID NO: 2742 - protein, 9 aa, synthetic construct
  REGION 1..9: note = Description of sequence: Wildtype peptide from Table 8
ILNAMITKI

SEQ ID NO: 2743 - protein, 9 aa, synthetic construct
  REGION 1..9: note = Description of sequence: Wildtype peptide from Table 8
KLSELHAYI

SEQ ID NO: 2744 - protein, 9 aa, synthetic construct
  REGION 1..9: note = Description of sequence: Wildtype peptide from Table 8
SLLLLPVSV

SEQ ID NO: 2745 - protein, 9 aa, synthetic construct
  REGION 1..9: note = Description of sequence: Wildtype peptide from Table 8
YMAKLTVTL

SEQ ID NO: 2746 - protein, 9 aa, synthetic construct
  REGION 1..9: note = Description of sequence: Wildtype peptide from Table 8
YMYGSPGEL

SEQ ID NO: 2747 - protein, 10 aa, synthetic construct
  REGION 1..10: note = Description of sequence: Wildtype peptide from Table 8
VMPFSIVYIV

SEQ ID NO: 2748 - protein, 9 aa, synthetic construct
  REGION 1..9: note = Description of sequence: Wildtype peptide from Table 8
VMPFSIVYI

SEQ ID NO: 2749 - protein, 10 aa, synthetic construct
  REGION 1..10: note = Description of sequence: Wildtype peptide from Table 8
LVMPFSIVYI

SEQ ID NO: 2750 - protein, 10 aa, synthetic construct
  REGION 1..10: note = Description of sequence: Wildtype peptide from Table 8
TMSSSHLFYL

SEQ ID NO: 2751 - protein, 9 aa, synthetic construct
  REGION 1..9: note = Description of sequence: Wildtype peptide from Table 8
FITGISILL

SEQ ID NO: 2752 - protein, 9 aa, synthetic construct
  REGION 1..9: note = Description of sequence: Wildtype peptide from Table 8
VLLHRAFLV

SEQ ID NO: 2753 - protein, 9 aa, synthetic construct
  REGION 1..9: note = Description of sequence: Wildtype peptide from Table 8
FSSEVLNLV

SEQ ID NO: 2754 - protein, 9 aa, synthetic construct
  REGION 1..9: note = Description of sequence: Wildtype peptide from Table 8
RLGPYLEFL

SEQ ID NO: 2755 - protein, 9 aa, synthetic construct
  REGION 1..9: note = Description of sequence: Wildtype peptide from Table 8
KLSREIMPV

SEQ ID NO: 2756 - protein, 9 aa, synthetic construct
  REGION 1..9: note = Description of sequence: Wildtype peptide from Table 8
LLAILPYYV

SEQ ID NO: 2757 - protein, 9 aa, synthetic construct
  REGION 1..9: note = Description of sequence: Wildtype peptide from Table 8
FLPDLNANA

SEQ ID NO: 2758 - protein, 9 aa, synthetic construct
  REGION 1..9: note = Description of sequence: Wildtype peptide from Table 8
YTSEISSPI

SEQ ID NO: 2759 - protein, 9 aa, synthetic construct
  REGION 1..9: note = Description of sequence: Wildtype peptide from Table 8
NLFNRYPAL

SEQ ID NO: 2760 - protein, 10 aa, synthetic construct
  REGION 1..10: note = Description of sequence: Wildtype peptide from Table 8
FLIASVTWLL

SEQ ID NO: 2761 - protein, 9 aa, synthetic construct
  REGION 1..9: note = Description of sequence: Wildtype peptide from Table 8
FLIASVTWL

SEQ ID NO: 2762 - protein, 9 aa, synthetic construct
  REGION 1..9: note = Description of sequence: Wildtype peptide from Table 8
FLDEFMEAV

SEQ ID NO: 2763 - protein, 9 aa, synthetic construct
  REGION 1..9: note = Description of sequence: Wildtype peptide from Table 8
ALSPVIPLI

SEQ ID NO: 2764 - protein, 9 aa, synthetic construct
  REGION 1..9: note = Description of sequence: Wildtype peptide from Table 8
YLWPAVQLA

SEQ ID NO: 2765 - protein, 9 aa, synthetic construct
  REGION 1..9: note = Description of sequence: Wildtype peptide from Table 8
RLWEPLRVV

SEQ ID NO: 2766 - protein, 10 aa, synthetic construct
  REGION 1..10: note = Description of sequence: Wildtype peptide from Table 8
LLFGMTPCLL

SEQ ID NO: 2767 - protein, 9 aa, synthetic construct
  REGION 1..9: note = Description of sequence: Wildtype peptide from Table 8
LLFGMTPCL

SEQ ID NO: 2768 - protein, 9 aa, synthetic construct
  REGION 1..9: note = Description of sequence: Wildtype peptide from Table 8
GLDETIAKL

SEQ ID NO: 2769 - protein, 9 aa, synthetic construct
  REGION 1..9: note = Description of sequence: Wildtype peptide from Table 8
RVIGMPPPV

SEQ ID NO: 2770 - protein, 9 aa, synthetic construct
  REGION 1..9: note = Description of sequence: Wildtype peptide from Table 8
LLDEKEPEV

SEQ ID NO: 2771 - protein, 9 aa, synthetic construct
  REGION 1..9: note = Description of sequence: Wildtype peptide from Table 8
FIDQYYSSI

SEQ ID NO: 2772 - protein, 9 aa, synthetic construct
  REGION 1..9: note = Description of sequence: Wildtype peptide from Table 8
ILTGLNYEA

SEQ ID NO: 2773 - protein, 9 aa, synthetic construct
  REGION 1..9: note = Description of sequence: Wildtype peptide from Table 8
ILDPADPTL

SEQ ID NO: 2774 - protein, 9 aa, synthetic construct
  REGION 1..9: note = Description of sequence: Wildtype peptide from Table 8
ILIVMVPFL

SEQ ID NO: 2775 - protein, 9 aa, synthetic construct
  REGION 1..9: note = Description of sequence: Wildtype peptide from Table 8
FMLYLVTLM

SEQ ID NO: 2776 - protein, 9 aa, synthetic construct
  REGION 1..9: note = Description of sequence: Wildtype peptide from Table 8
FLFMYLVTV

SEQ ID NO: 2777 - protein, 9 aa, synthetic construct
  REGION 1..9: note = Description of sequence: Wildtype peptide from Table 8
FLNVFFPLL

SEQ ID NO: 2778 - protein, 9 aa, synthetic construct
  REGION 1..9: note = Description of sequence: Wildtype peptide from Table 8
YIFLGNLAL

SEQ ID NO: 2779 - protein, 9 aa, synthetic construct
  REGION 1..9: note = Description of sequence: Wildtype peptide from Table 8
KMVAVFYTT

SEQ ID NO: 2780 - protein, 9 aa, synthetic construct
  REGION 1..9: note = Description of sequence: Wildtype peptide from Table 8
VLNPFIYTL

SEQ ID NO: 2781 - protein, 9 aa, synthetic construct
  REGION 1..9: note = Description of sequence: Wildtype peptide from Table 8
YVNELVVFV

SEQ ID NO: 2782 - protein, 10 aa, synthetic construct
  REGION 1..10: note = Description of sequence: Wildtype peptide from Table 8
FLGIYTVTVV

SEQ ID NO: 2783 - protein, 9 aa, synthetic construct
  REGION 1..9: note = Description of sequence: Wildtype peptide from Table 8
FLGIYTVTV

SEQ ID NO: 2784 - protein, 9 aa, synthetic construct
  REGION 1..9: note = Description of sequence: Wildtype peptide from Table 8
FLFTFFASI

SEQ ID NO: 2785 - protein, 9 aa, synthetic construct
  REGION 1..9: note = Description of sequence: Wildtype peptide from Table 8
SIDCYLLAI

SEQ ID NO: 2786 - protein, 9 aa, synthetic construct
  REGION 1..9: note = Description of sequence: Wildtype peptide from Table 8
SLLQGSPHL

SEQ ID NO: 2787 - protein, 9 aa, synthetic construct
  REGION 1..9: note = Description of sequence: Wildtype peptide from Table 8
MLGERLFPL

SEQ ID NO: 2788 - protein, 9 aa, synthetic construct
  REGION 1..9: note = Description of sequence: Wildtype peptide from Table 8
FLFSVLLFV

SEQ ID NO: 2789 - protein, 9 aa, synthetic construct
  REGION 1..9: note = Description of sequence: Wildtype peptide from Table 8
LVLPLVMGV

SEQ ID NO: 2790 - protein, 9 aa, synthetic construct
  REGION 1..9: note = Description of sequence: Wildtype peptide from Table 8
RLHDLVLPL

SEQ ID NO: 2791 - protein, 9 aa, synthetic construct
  REGION 1..9: note = Description of sequence: Wildtype peptide from Table 8
AVGSHVYSV

SEQ ID NO: 2792 - protein, 9 aa, synthetic construct
  REGION 1..9: note = Description of sequence: Wildtype peptide from Table 8
LLSIISFPA

SEQ ID NO: 2793 - protein, 9 aa, synthetic construct
  REGION 1..9: note = Description of sequence: Wildtype peptide from Table 8
FLTVFSPFM

SEQ ID NO: 2794 - protein, 9 aa, synthetic construct
  REGION 1..9: note = Description of sequence: Wildtype peptide from Table 8
VLFAAFSSA

SEQ ID NO: 2795 - protein, 9 aa, synthetic construct
  REGION 1..9: note = Description of sequence: Wildtype peptide from Table 8
LLLVSLWGL

SEQ ID NO: 2796 - protein, 9 aa, synthetic construct
  REGION 1..9: note = Description of sequence: Wildtype peptide from Table 8
HQLGGVVEV

SEQ ID NO: 2797 - protein, 9 aa, synthetic construct
  REGION 1..9: note = Description of sequence: Wildtype peptide from Table 8
SILDAVQRV

SEQ ID NO: 2798 - protein, 9 aa, synthetic construct
  REGION 1..9: note = Description of sequence: Wildtype peptide from Table 8
KLSEYRNSL

SEQ ID NO: 2799 - protein, 10 aa, synthetic construct
  REGION 1..10: note = Description of sequence: Wildtype peptide from Table 8
LLADQNLKFI

SEQ ID NO: 2800 - protein, 9 aa, synthetic construct
  REGION 1..9: note = Description of sequence: Wildtype peptide from Table 8
VLNYFEPYL

SEQ ID NO: 2801 - protein, 9 aa, synthetic construct
  REGION 1..9: note = Description of sequence: Wildtype peptide from Table 8
ALVGAIPSI

SEQ ID NO: 2802 - protein, 9 aa, synthetic construct
  REGION 1..9: note = Description of sequence: Wildtype peptide from Table 8
FLYNPLTRV

SEQ ID NO: 2803 - protein, 9 aa, synthetic construct
  REGION 1..9: note = Description of sequence: Wildtype peptide from Table 8
HMVEISTPV

SEQ ID NO: 2804 - protein, 9 aa, synthetic construct
  REGION 1..9: note = Description of sequence: Wildtype peptide from Table 8
KLLAGDEIV

SEQ ID NO: 2805 - protein, 10 aa, synthetic construct
  REGION 1..10: note = Description of sequence: Wildtype peptide from Table 8
ILGGQVVHTV

SEQ ID NO: 2806 - protein, 9 aa, synthetic construct
  REGION 1..9: note = Description of sequence: Wildtype peptide from Table 8
AMAGSPVFL

SEQ ID NO: 2807 - protein, 9 aa, synthetic construct
  REGION 1..9: note = Description of sequence: Wildtype peptide from Table 8
YMSTTIIAA

SEQ ID NO: 2808 - protein, 9 aa, synthetic construct
  REGION 1..9: note = Description of sequence: Wildtype peptide from Table 8
ILVAQIFGL

SEQ ID NO: 2809 - protein, 9 aa, synthetic construct
  REGION 1..9: note = Description of sequence: Wildtype peptide from Table 8
ILIAQVLGL

SEQ ID NO: 2810 - protein, 10 aa, synthetic construct
  REGION 1..10: note = Description of sequence: Wildtype peptide from Table 8
RIWAALFLGL

SEQ ID NO: 2811 - protein, 9 aa, synthetic construct
  REGION 1..9: note = Description of sequence: Wildtype peptide from Table 8
LLGGWTVLL

SEQ ID NO: 2812 - protein, 10 aa, synthetic construct
  REGION 1..10: note = Description of sequence: Wildtype peptide from Table 8
KLFEFLVHGV

SEQ ID NO: 2813 - protein, 9 aa, synthetic construct
  REGION 1..9: note = Description of sequence: Wildtype peptide from Table 8
KLAKPLPYT

SEQ ID NO: 2814 - protein, 9 aa, synthetic construct
  REGION 1..9: note = Description of sequence: Wildtype peptide from Table 8
KLSHQPVLL

SEQ ID NO: 2815 - protein, 9 aa, synthetic construct
  REGION 1..9: note = Description of sequence: Wildtype peptide from Table 8
FLLDEANGL

SEQ ID NO: 2816 - protein, 9 aa, synthetic construct
  REGION 1..9: note = Description of sequence: Wildtype peptide from Table 8
YLQDSLATT

SEQ ID NO: 2817 - protein, 10 aa, synthetic construct
  REGION 1..10: note = Description of sequence: Wildtype peptide from Table 8
FLMASISSSL

SEQ ID NO: 2818 - protein, 9 aa, synthetic construct
  REGION 1..9: note = Description of sequence: Wildtype peptide from Table 8
FLMASISSS

SEQ ID NO: 2819 - protein, 9 aa, synthetic construct
  REGION 1..9: note = Description of sequence: Wildtype peptide from Table 8
LMASISSSL

SEQ ID NO: 2820 - protein, 9 aa, synthetic construct
  REGION 1..9: note = Description of sequence: Wildtype peptide from Table 8
LLFALYFSA

SEQ ID NO: 2821 - protein, 9 aa, synthetic construct
  REGION 1..9: note = Description of sequence: Wildtype peptide from Table 8
RLMKHYPGI

SEQ ID NO: 2822 - protein, 9 aa, synthetic construct
  REGION 1..9: note = Description of sequence: Wildtype peptide from Table 8
FMSAYSGVL

SEQ ID NO: 2823 - protein, 9 aa, synthetic construct
  REGION 1..9: note = Description of sequence: Wildtype peptide from Table 8
GMGPLLATV

SEQ ID NO: 2824 - protein, 10 aa, synthetic construct
  REGION 1..10: note = Description of sequence: Wildtype peptide from Table 8
SVLENFTILL

SEQ ID NO: 2825 - protein, 10 aa, synthetic construct
  REGION 1..10: note = Description of sequence: Wildtype peptide from Table 8
VLENFTILLV

SEQ ID NO: 2826 - protein, 9 aa, synthetic construct
  REGION 1..9: note = Description of sequence: Wildtype peptide from Table 8
FLMTLETKM

SEQ ID NO: 2827 - protein, 10 aa, synthetic construct
  REGION 1..10: note = Description of sequence: Wildtype peptide from Table 8
VTFAVSFYLV

SEQ ID NO: 2828 - protein, 9 aa, synthetic construct
  REGION 1..9: note = Description of sequence: Wildtype peptide from Table 8
ALSQVTLLL

SEQ ID NO: 2829 - protein, 9 aa, synthetic construct
  REGION 1..9: note = Description of sequence: Wildtype peptide from Table 8
YTPEHAASV

SEQ ID NO: 2830 - protein, 9 aa, synthetic construct
  REGION 1..9: note = Description of sequence: Wildtype peptide from Table 8
SLAETFWET

SEQ ID NO: 2831 - protein, 9 aa, synthetic construct
  REGION 1..9: note = Description of sequence: Wildtype peptide from Table 8
RMAAISNTV

SEQ ID NO: 2832 - protein, 9 aa, synthetic construct
  REGION 1..9: note = Description of sequence: Wildtype peptide from Table 8
VLASPSVPL

SEQ ID NO: 2833 - protein, 9 aa, synthetic construct
  REGION 1..9: note = Description of sequence: Wildtype peptide from Table 8
YMVLASPSV

SEQ ID NO: 2834 - protein, 9 aa, synthetic construct
  REGION 1..9: note = Description of sequence: Wildtype peptide from Table 8
MLLKQDVSL

SEQ ID NO: 2835 - protein, 9 aa, synthetic construct
  REGION 1..9: note = Description of sequence: Wildtype peptide from Table 8
LLLNMLIAL

SEQ ID NO: 2836 - protein, 9 aa, synthetic construct
  REGION 1..9: note = Description of sequence: Wildtype peptide from Table 8
FMIGYASAL

SEQ ID NO: 2837 - protein, 9 aa, synthetic construct
  REGION 1..9: note = Description of sequence: Wildtype peptide from Table 8
YLLFMIGYA

SEQ ID NO: 2838 - protein, 9 aa, synthetic construct
  REGION 1..9: note = Description of sequence: Wildtype peptide from Table 8
KLPLDINPV

SEQ ID NO: 2839 - protein, 9 aa, synthetic construct
  REGION 1..9: note = Description of sequence: Wildtype peptide from Table 8
SQLNQSFEI

SEQ ID NO: 2840 - protein, 9 aa, synthetic construct
  REGION 1..9: note = Description of sequence: Wildtype peptide from Table 8
LIIPCIHLI

SEQ ID NO: 2841 - protein, 9 aa, synthetic construct
  REGION 1..9: note = Description of sequence: Wildtype peptide from Table 8
LMLWASSSI

SEQ ID NO: 2842 - protein, 9 aa, synthetic construct
  REGION 1..9: note = Description of sequence: Wildtype peptide from Table 8
MIISHLSLI

SEQ ID NO: 2843 - protein, 9 aa, synthetic construct
  REGION 1..9: note = Description of sequence: Wildtype peptide from Table 8
FLTYLDVSV

SEQ ID NO: 2844 - protein, 9 aa, synthetic construct
  REGION 1..9: note = Description of sequence: Wildtype peptide from Table 8
LLLTFNVSV

SEQ ID NO: 2845 - protein, 9 aa, synthetic construct
  REGION 1..9: note = Description of sequence: Wildtype peptide from Table 8
SLLWMNPFV

SEQ ID NO: 2846 - protein, 9 aa, synthetic construct
  REGION 1..9: note = Description of sequence: Wildtype peptide from Table 8
FTQEEWYHV

SEQ ID NO: 2847 - protein, 9 aa, synthetic construct
  REGION 1..9: note = Description of sequence: Wildtype peptide from Table 8
NLFSQDISV

SEQ ID NO: 2848 - protein, 9 aa, synthetic construct
  REGION 1..9: note = Description of sequence: Mutant peptide from Table 8
MLVDDAHGL

SEQ ID NO: 2849 - protein, 9 aa, synthetic construct
  REGION 1..9: note = Description of sequence: Mutant peptide from Table 8
YLDELIRNT

SEQ ID NO: 2850 - protein, 9 aa, synthetic construct
  REGION 1..9: note = Description of sequence: Mutant peptide from Table 8
FLQFRGNEV

SEQ ID NO: 2851 - protein, 9 aa, synthetic construct
  REGION 1..9: note = Description of sequence: Mutant peptide from Table 8
ILTDIEEKV

SEQ ID NO: 2852 - protein, 9 aa, synthetic construct
  REGION 1..9: note = Description of sequence: Mutant peptide from Table 8
FMPDFDLHL

SEQ ID NO: 2853 - protein, 9 aa, synthetic construct
  REGION 1..9: note = Description of sequence: Mutant peptide from Table 8
KLMNIQQKL

SEQ ID NO: 2854 - protein, 9 aa, synthetic construct
  REGION 1..9: note = Description of sequence: Mutant peptide from Table 8
GMFPVDKPV

SEQ ID NO: 2855 - protein, 9 aa, synthetic construct
  REGION 1..9: note = Description of sequence: Mutant peptide from Table 8
VQYLGMFPV

SEQ ID NO: 2856 - protein, 9 aa, synthetic construct
  REGION 1..9: note = Description of sequence: Mutant peptide from Table 8
WLPHVEYEL

SEQ ID NO: 2857 - protein, 9 aa, synthetic construct
  REGION 1..9: note = Description of sequence: Mutant peptide from Table 8
KLWASPLHV

SEQ ID NO: 2858 - protein, 9 aa, synthetic construct
  REGION 1..9: note = Description of sequence: Mutant peptide from Table 8
ILNVDIFTL

SEQ ID NO: 2859 - protein, 9 aa, synthetic construct
  REGION 1..9: note = Description of sequence: Mutant peptide from Table 8
FVYVFITHL

SEQ ID NO: 2860 - protein, 9 aa, synthetic construct
  REGION 1..9: note = Description of sequence: Mutant peptide from Table 8
FMLLTQARI

SEQ ID NO: 2861 - protein, 10 aa, synthetic construct
  REGION 1..10: note = Description of sequence: Mutant peptide from Table 8
MLSILALVRV

SEQ ID NO: 2862 - protein, 9 aa, synthetic construct
  REGION 1..9: note = Description of sequence: Mutant peptide from Table 8
ALSYTPAEV

SEQ ID NO: 2863 - protein, 10 aa, synthetic construct
  REGION 1..10: note = Description of sequence: Mutant peptide from Table 8
HLMDGDLGLI

SEQ ID NO: 2864 - protein, 9 aa, synthetic construct
  REGION 1..9: note = Description of sequence: Mutant peptide from Table 8
HLMDGDLGL

SEQ ID NO: 2865 - protein, 9 aa, synthetic construct
  REGION 1..9: note = Description of sequence: Mutant peptide from Table 8
LMVPHSPSL

SEQ ID NO: 2866 - protein, 9 aa, synthetic construct
  REGION 1..9: note = Description of sequence: Mutant peptide from Table 8
KLFEQILNA

SEQ ID NO: 2867 - protein, 9 aa, synthetic construct
  REGION 1..9: note = Description of sequence: Mutant peptide from Table 8
YMLTLHTKL

SEQ ID NO: 2868 - protein, 9 aa, synthetic construct
  REGION 1..9: note = Description of sequence: Mutant peptide from Table 8
GLTSFFIAI

SEQ ID NO: 2869 - protein, 9 aa, synthetic construct
  REGION 1..9: note = Description of sequence: Mutant peptide from Table 8
FLSDHLYLV

SEQ ID NO: 2870 - protein, 9 aa, synthetic construct
  REGION 1..9: note = Description of sequence: Mutant peptide from Table 8
YLLAIFSGL

SEQ ID NO: 2871 - protein, 9 aa, synthetic construct
  REGION 1..9: note = Description of sequence: Mutant peptide from Table 8
KLNTITAVV

SEQ ID NO: 2872 - protein, 9 aa, synthetic construct
  REGION 1..9: note = Description of sequence: Mutant peptide from Table 8
MLMLAVIVA

SEQ ID NO: 2873 - protein, 9 aa, synthetic construct
  REGION 1..9: note = Description of sequence: Mutant peptide from Table 8
LLAGTLAVV

SEQ ID NO: 2874 - protein, 9 aa, synthetic construct
  REGION 1..9: note = Description of sequence: Mutant peptide from Table 8
SLAPLSPRV

SEQ ID NO: 2875 - protein, 10 aa, synthetic construct
  REGION 1..10: note = Description of sequence: Mutant peptide from Table 8
VLLGVKLFGV

SEQ ID NO: 2876 - protein, 9 aa, synthetic construct
  REGION 1..9: note = Description of sequence: Mutant peptide from Table 8
TLFTMVGTV

SEQ ID NO: 2877 - protein, 9 aa, synthetic construct
  REGION 1..9: note = Description of sequence: Mutant peptide from Table 8
LLAIKVPNV

SEQ ID NO: 2878 - protein, 9 aa, synthetic construct
  REGION 1..9: note = Description of sequence: Mutant peptide from Table 8
LLAMTVPNV

SEQ ID NO: 2879 - protein, 10 aa, synthetic construct
  REGION 1..10: note = Description of sequence: Mutant peptide from Table 8
FMTKINDLEV

SEQ ID NO: 2880 - protein, 9 aa, synthetic construct
  REGION 1..9: note = Description of sequence: Mutant peptide from Table 8
FLNDLLSVL

SEQ ID NO: 2881 - protein, 9 aa, synthetic construct
  REGION 1..9: note = Description of sequence: Mutant peptide from Table 8
GLMVIAWFI

SEQ ID NO: 2882 - protein, 9 aa, synthetic construct
  REGION 1..9: note = Description of sequence: Mutant peptide from Table 8
FIFSYVVAV

SEQ ID NO: 2883 - protein, 9 aa, synthetic construct
  REGION 1..9: note = Description of sequence: Mutant peptide from Table 8
ALIHHNTYL

SEQ ID NO: 2884 - protein, 9 aa, synthetic construct
  REGION 1..9: note = Description of sequence: Mutant peptide from Table 8
ILLDWAANI

SEQ ID NO: 2885 - protein, 9 aa, synthetic construct
  REGION 1..9: note = Description of sequence: Mutant peptide from Table 8
SLFSELSPV

SEQ ID NO: 2886 - protein, 9 aa, synthetic construct
  REGION 1..9: note = Description of sequence: Mutant peptide from Table 8
SVLEYYTEL

SEQ ID NO: 2887 - protein, 9 aa, synthetic construct
  REGION 1..9: note = Description of sequence: Mutant peptide from Table 8
HIAKSLFEV

SEQ ID NO: 2888 - protein, 9 aa, synthetic construct
  REGION 1..9: note = Description of sequence: Mutant peptide from Table 8
VVMSWAPPV

SEQ ID NO: 2889 - protein, 9 aa, synthetic construct
  REGION 1..9: note = Description of sequence: Mutant peptide from Table 8
TAMDIFVTV

SEQ ID NO: 2890 - protein, 9 aa, synthetic construct
  REGION 1..9: note = Description of sequence: Mutant peptide from Table 8
YVTAMDIFV

SEQ ID NO: 2891 - protein, 9 aa, synthetic construct
  REGION 1..9: note = Description of sequence: Mutant peptide from Table 8
YVLTWIVGA

SEQ ID NO: 2892 - protein, 9 aa, synthetic construct
  REGION 1..9: note = Description of sequence: Mutant peptide from Table 8
ALYGFVPVL

SEQ ID NO: 2893 - protein, 10 aa, synthetic construct
  REGION 1..10: note = Description of sequence: Mutant peptide from Table 8
ALLETPSLLL

SEQ ID NO: 2894 - protein, 9 aa, synthetic construct
  REGION 1..9: note = Description of sequence: Mutant peptide from Table 8
ALLETPSLL

SEQ ID NO: 2895 - protein, 9 aa, synthetic construct
  REGION 1..9: note = Description of sequence: Mutant peptide from Table 8
LIFNMLYWI

SEQ ID NO: 2896 - protein, 9 aa, synthetic construct
  REGION 1..9: note = Description of sequence: Mutant peptide from Table 8
SLDLTTSPV

SEQ ID NO: 2897 - protein, 9 aa, synthetic construct
  REGION 1..9: note = Description of sequence: Mutant peptide from Table 8
KMPLANIYL

SEQ ID NO: 2898 - protein, 9 aa, synthetic construct
  REGION 1..9: note = Description of sequence: Mutant peptide from Table 8
FSFSLDFLV

SEQ ID NO: 2899 - protein, 9 aa, synthetic construct
  REGION 1..9: note = Description of sequence: Mutant peptide from Table 8
FLQKYTVKL

SEQ ID NO: 2900 - protein, 9 aa, synthetic construct
  REGION 1..9: note = Description of sequence: Mutant peptide from Table 8
ILNAMIAKI

SEQ ID NO: 2901 - protein, 9 aa, synthetic construct
  REGION 1..9: note = Description of sequence: Mutant peptide from Table 8
KLSELHTYI

SEQ ID NO: 2902 - protein, 9 aa, synthetic construct
  REGION 1..9: note = Description of sequence: Mutant peptide from Table 8
SLLLLSVSV

SEQ ID NO: 2903 - protein, 9 aa, synthetic construct
  REGION 1..9: note = Description of sequence: Mutant peptide from Table 8
YMAELTVTL

SEQ ID NO: 2904 - protein, 9 aa, synthetic construct
  REGION 1..9: note = Description of sequence: Mutant peptide from Table 8
YMYDSPGEL

SEQ ID NO: 2905 - protein, 10 aa, synthetic construct
  REGION 1..10: note = Description of sequence: Mutant peptide from Table 8
MMPFSIVYIV

SEQ ID NO: 2906 - protein, 9 aa, synthetic construct
  REGION 1..9: note = Description of sequence: Mutant peptide from Table 8
MMPFSIVYI

SEQ ID NO: 2907 - protein, 10 aa, synthetic construct
  REGION 1..10: note = Description of sequence: Mutant peptide from Table 8
LMMPFSIVYI

SEQ ID NO: 2908 - protein, 10 aa, synthetic construct
  REGION 1..10: note = Description of sequence: Mutant peptide from Table 8
TMSFSHLFYL

SEQ ID NO: 2909 - protein, 9 aa, synthetic construct
  REGION 1..9: note = Description of sequence: Mutant peptide from Table 8
FIMGISILL

SEQ ID NO: 2910 - protein, 9 aa, synthetic construct
  REGION 1..9: note = Description of sequence: Mutant peptide from Table 8
VLFHRAFLV

SEQ ID NO: 2911 - protein, 9 aa, synthetic construct
  REGION 1..9: note = Description of sequence: Mutant peptide from Table 8
FSSDVLNLV

SEQ ID NO: 2912 - protein, 9 aa, synthetic construct
  REGION 1..9: note = Description of sequence: Mutant peptide from Table 8
RLVPYLEFL

SEQ ID NO: 2913 - protein, 9 aa, synthetic construct
  REGION 1..9: note = Description of sequence: Mutant peptide from Table 8
KLSREIKPV

SEQ ID NO: 2914 - protein, 9 aa, synthetic construct
  REGION 1..9: note = Description of sequence: Mutant peptide from Table 8
LLAILTYYV

SEQ ID NO: 2915 - protein, 9 aa, synthetic construct
  REGION 1..9: note = Description of sequence: Mutant peptide from Table 8
FLPDLNVNA

SEQ ID NO: 2916 - protein, 9 aa, synthetic construct
  REGION 1..9: note = Description of sequence: Mutant peptide from Table 8
YTSEILSPI

SEQ ID NO: 2917 - protein, 9 aa, synthetic construct
  REGION 1..9: note = Description of sequence: Mutant peptide from Table 8
NLFNRYLAL

SEQ ID NO: 2918 - protein, 10 aa, synthetic construct
  REGION 1..10: note = Description of sequence: Mutant peptide from Table 8
LLIASVTWLL

SEQ ID NO: 2919 - protein, 9 aa, synthetic construct
  REGION 1..9: note = Description of sequence: Mutant peptide from Table 8
LLIASVTWL

SEQ ID NO: 2920 - protein, 9 aa, synthetic construct
  REGION 1..9: note = Description of sequence: Mutant peptide from Table 8
FLDEFMEGV

SEQ ID NO: 2921 - protein, 9 aa, synthetic construct
  REGION 1..9: note = Description of sequence: Mutant peptide from Table 8
ALSPVIPHI

SEQ ID NO: 2922 - protein, 9 aa, synthetic construct
  REGION 1..9: note = Description of sequence: Mutant peptide from Table 8
YLWPPVQLA

SEQ ID NO: 2923 - protein, 9 aa, synthetic construct
  REGION 1..9: note = Description of sequence: Mutant peptide from Table 8
WLWEPLRVV

SEQ ID NO: 2924 - protein, 10 aa, synthetic construct
  REGION 1..10: note = Description of sequence: Mutant peptide from Table 8
LLFGMPPCLL

SEQ ID NO: 2925 - protein, 9 aa, synthetic construct
  REGION 1..9: note = Description of sequence: Mutant peptide from Table 8
LLFGMPPCL

SEQ ID NO: 2926 - protein, 9 aa, synthetic construct
  REGION 1..9: note = Description of sequence: Mutant peptide from Table 8
GLNETIAKL

SEQ ID NO: 2927 - protein, 9 aa, synthetic construct
  REGION 1..9: note = Description of sequence: Mutant peptide from Table 8
LVIGMPPPV

SEQ ID NO: 2928 - protein, 9 aa, synthetic construct
  REGION 1..9: note = Description of sequence: Mutant peptide from Table 8
LLDEKGPEV

SEQ ID NO: 2929 - protein, 9 aa, synthetic construct
  REGION 1..9: note = Description of sequence: Mutant peptide from Table 8
FIYQYYSSI

SEQ ID NO: 2930 - protein, 9 aa, synthetic construct
  REGION 1..9: note = Description of sequence: Mutant peptide from Table 8
ILTGLNYEV

SEQ ID NO: 2931 - protein, 9 aa, synthetic construct
  REGION 1..9: note = Description of sequence: Mutant peptide from Table 8
ILNPADPTL

SEQ ID NO: 2932 - protein, 9 aa, synthetic construct
  REGION 1..9: note = Description of sequence: Mutant peptide from Table 8
ILIVMFPFL

SEQ ID NO: 2933 - protein, 9 aa, synthetic construct
  REGION 1..9: note = Description of sequence: Mutant peptide from Table 8
FMLYLLTLM

SEQ ID NO: 2934 - protein, 9 aa, synthetic construct
  REGION 1..9: note = Description of sequence: Mutant peptide from Table 8
FLFMYLVMV

SEQ ID NO: 2935 - protein, 9 aa, synthetic construct
  REGION 1..9: note = Description of sequence: Mutant peptide from Table 8
FLNVLFPLL

SEQ ID NO: 2936 - protein, 9 aa, synthetic construct
  REGION 1..9: note = Description of sequence: Mutant peptide from Table 8
YIFLENLAL

SEQ ID NO: 2937 - protein, 9 aa, synthetic construct
  REGION 1..9: note = Description of sequence: Mutant peptide from Table 8
KMVAVFYNT

SEQ ID NO: 2938 - protein, 9 aa, synthetic construct
  REGION 1..9: note = Description of sequence: Mutant peptide from Table 8
VLNPFIYML

SEQ ID NO: 2939 - protein, 9 aa, synthetic construct
  REGION 1..9: note = Description of sequence: Mutant peptide from Table 8
YLNELVVFV

SEQ ID NO: 2940 - protein, 10 aa, synthetic construct
  REGION 1..10: note = Description of sequence: Mutant peptide from Table 8
FLEIYTVTVV

SEQ ID NO: 2941 - protein, 9 aa, synthetic construct
  REGION 1..9: note = Description of sequence: Mutant peptide from Table 8
FLEIYTVTV

SEQ ID NO: 2942 - protein, 9 aa, synthetic construct
  REGION 1..9: note = Description of sequence: Mutant peptide from Table 8
FLFTFFAFI

SEQ ID NO: 2943 - protein, 9 aa, synthetic construct
  REGION 1..9: note = Description of sequence: Mutant peptide from Table 8
FIDCYLLAI

SEQ ID NO: 2944 - protein, 9 aa, synthetic construct
  REGION 1..9: note = Description of sequence: Mutant peptide from Table 8
SLLQGSPHV

SEQ ID NO: 2945 - protein, 9 aa, synthetic construct
  REGION 1..9: note = Description of sequence: Mutant peptide from Table 8
MLGEQLFPL

SEQ ID NO: 2946 - protein, 9 aa, synthetic construct
  REGION 1..9: note = Description of sequence: Mutant peptide from Table 8
FLFLVLLFV

SEQ ID NO: 2947 - protein, 9 aa, synthetic construct
  REGION 1..9: note = Description of sequence: Mutant peptide from Table 8
LVFPLVMGV

SEQ ID NO: 2948 - protein, 9 aa, synthetic construct
  REGION 1..9: note = Description of sequence: Mutant peptide from Table 8
RLHDLVFPL

SEQ ID NO: 2949 - protein, 9 aa, synthetic construct
  REGION 1..9: note = Description of sequence: Mutant peptide from Table 8
AVGSYVYSV

SEQ ID NO: 2950 - protein, 9 aa, synthetic construct
  REGION 1..9: note = Description of sequence: Mutant peptide from Table 8
LLSIIFFPA

SEQ ID NO: 2951 - protein, 9 aa, synthetic construct
  REGION 1..9: note = Description of sequence: Mutant peptide from Table 8
FLTVFSHFM

SEQ ID NO: 2952 - protein, 9 aa, synthetic construct
  REGION 1..9: note = Description of sequence: Mutant peptide from Table 8
LLFAAFSSA

SEQ ID NO: 2953 - protein, 9 aa, synthetic construct
  REGION 1..9: note = Description of sequence: Mutant peptide from Table 8
QLLVSLWGL

SEQ ID NO: 2954 - protein, 9 aa, synthetic construct
  REGION 1..9: note = Description of sequence: Mutant peptide from Table 8
HQLGVVVEV

SEQ ID NO: 2955 - protein, 9 aa, synthetic construct
  REGION 1..9: note = Description of sequence: Mutant peptide from Table 8
FILDAVQRV

SEQ ID NO: 2956 - protein, 9 aa, synthetic construct
  REGION 1..9: note = Description of sequence: Mutant peptide from Table 8
KLSEYHNSL

SEQ ID NO: 2957 - protein, 10 aa, synthetic construct
  REGION 1..10: note = Description of sequence: Mutant peptide from Table 8
LLADQNFKFI

SEQ ID NO: 2958 - protein, 9 aa, synthetic construct
  REGION 1..9: note = Description of sequence: Mutant peptide from Table 8
VLNYFKPYL

SEQ ID NO: 2959 - protein, 9 aa, synthetic construct
  REGION 1..9: note = Description of sequence: Mutant peptide from Table 8
ALVGAISSI

SEQ ID NO: 2960 - protein, 9 aa, synthetic construct
  REGION 1..9: note = Description of sequence: Mutant peptide from Table 8
FLYNLLTRV

SEQ ID NO: 2961 - protein, 9 aa, synthetic construct
  REGION 1..9: note = Description of sequence: Mutant peptide from Table 8
HIVEISTPV

SEQ ID NO: 2962 - protein, 9 aa, synthetic construct
  REGION 1..9: note = Description of sequence: Mutant peptide from Table 8
KLLAGVEIV

SEQ ID NO: 2963 - protein, 10 aa, synthetic construct
  REGION 1..10: note = Description of sequence: Mutant peptide from Table 8
ILGEQVVHTV

SEQ ID NO: 2964 - protein, 9 aa, synthetic construct
  REGION 1..9: note = Description of sequence: Mutant peptide from Table 8
AMAGSLVFL

SEQ ID NO: 2965 - protein, 9 aa, synthetic construct
  REGION 1..9: note = Description of sequence: Mutant peptide from Table 8
YMPTTIIAA

SEQ ID NO: 2966 - protein, 9 aa, synthetic construct
  REGION 1..9: note = Description of sequence: Mutant peptide from Table 8
ILVAQIFGM

SEQ ID NO: 2967 - protein, 9 aa, synthetic construct
  REGION 1..9: note = Description of sequence: Mutant peptide from Table 8
ILITQVLGL

SEQ ID NO: 2968 - protein, 10 aa, synthetic construct
  REGION 1..10: note = Description of sequence: Mutant peptide from Table 8
RILAALFLGL

SEQ ID NO: 2969 - protein, 9 aa, synthetic construct
  REGION 1..9: note = Description of sequence: Mutant peptide from Table 8
LLGSWTVLL

SEQ ID NO: 2970 - protein, 10 aa, synthetic construct
  REGION 1..10: note = Description of sequence: Mutant peptide from Table 8
KLFEFLVYGV

SEQ ID NO: 2971 - protein, 9 aa, synthetic construct
  REGION 1..9: note = Description of sequence: Mutant peptide from Table 8
KLANPLPYT

SEQ ID NO: 2972 - protein, 9 aa, synthetic construct
  REGION 1..9: note = Description of sequence: Mutant peptide from Table 8
KLSHQLVLL

SEQ ID NO: 2973 - protein, 9 aa, synthetic construct
  REGION 1..9: note = Description of sequence: Mutant peptide from Table 8
FLLDEAIGL

SEQ ID NO: 2974 - protein, 9 aa, synthetic construct
  REGION 1..9: note = Description of sequence: Mutant peptide from Table 8
YLQDSMATT

SEQ ID NO: 2975 - protein, 10 aa, synthetic construct
  REGION 1..10: note = Description of sequence: Mutant peptide from Table 8
FLMASISSFL

SEQ ID NO: 2976 - protein, 9 aa, synthetic construct
  REGION 1..9: note = Description of sequence: Mutant peptide from Table 8
FLMASISSF

SEQ ID NO: 2977 - protein, 9 aa, synthetic construct
  REGION 1..9: note = Description of sequence: Mutant peptide from Table 8
LMASISSFL

SEQ ID NO: 2978 - protein, 9 aa, synthetic construct
  REGION 1..9: note = Description of sequence: Mutant peptide from Table 8
LLFALHFSA

SEQ ID NO: 2979 - protein, 9 aa, synthetic construct
  REGION 1..9: note = Description of sequence: Mutant peptide from Table 8
RLIKHYPGI

SEQ ID NO: 2980 - protein, 9 aa, synthetic construct
  REGION 1..9: note = Description of sequence: Mutant peptide from Table 8
FMSSYSGVL

SEQ ID NO: 2981 - protein, 9 aa, synthetic construct
  REGION 1..9: note = Description of sequence: Mutant peptide from Table 8
GMGPLLAMV

SEQ ID NO: 2982 - protein, 10 aa, synthetic construct
  REGION 1..10: note = Description of sequence: Mutant peptide from Table 8
SVLENFTIFL

SEQ ID NO: 2983 - protein, 10 aa, synthetic construct
  REGION 1..10: note = Description of sequence: Mutant peptide from Table 8
VLENFTIFLV

SEQ ID NO: 2984 - protein, 9 aa, synthetic construct
  REGION 1..9: note = Description of sequence: Mutant peptide from Table 8
FLMTLETNM

SEQ ID NO: 2985 - protein, 10 aa, synthetic construct
  REGION 1..10: note = Description of sequence: Mutant peptide from Table 8
VTFAVSFYVV

SEQ ID NO: 2986 - protein, 9 aa, synthetic construct
  REGION 1..9: note = Description of sequence: Mutant peptide from Table 8
ALLQVTLLL

SEQ ID NO: 2987 - protein, 9 aa, synthetic construct
  REGION 1..9: note = Description of sequence: Mutant peptide from Table 8
YTSEHAASV

SEQ ID NO: 2988 - protein, 9 aa, synthetic construct
  REGION 1..9: note = Description of sequence: Mutant peptide from Table 8
SLAETFLET

SEQ ID NO: 2989 - protein, 9 aa, synthetic construct
  REGION 1..9: note = Description of sequence: Mutant peptide from Table 8
TMAAISNTV

SEQ ID NO: 2990 - protein, 9 aa, synthetic construct
  REGION 1..9: note = Description of sequence: Mutant peptide from Table 8
FLASPSVPL

SEQ ID NO: 2991 - protein, 9 aa, synthetic construct
  REGION 1..9: note = Description of sequence: Mutant peptide from Table 8
YMFLASPSV

SEQ ID NO: 2992 - protein, 9 aa, synthetic construct
  REGION 1..9: note = Description of sequence: Mutant peptide from Table 8
MLLKHDVSL

SEQ ID NO: 2993 - protein, 9 aa, synthetic construct
  REGION 1..9: note = Description of sequence: Mutant peptide from Table 8
LLLNMLIVL

SEQ ID NO: 2994 - protein, 9 aa, synthetic construct
  REGION 1..9: note = Description of sequence: Mutant peptide from Table 8
FMIGYTSAL

SEQ ID NO: 2995 - protein, 9 aa, synthetic construct
  REGION 1..9: note = Description of sequence: Mutant peptide from Table 8
YLLFMIGYT

SEQ ID NO: 2996 - protein, 9 aa, synthetic construct
  REGION 1..9: note = Description of sequence: Mutant peptide from Table 8
KLPLDIDPV

SEQ ID NO: 2997 - protein, 9 aa, synthetic construct
  REGION 1..9: note = Description of sequence: Mutant peptide from Table 8
FQLNQSFEI

SEQ ID NO: 2998 - protein, 9 aa, synthetic construct
  REGION 1..9: note = Description of sequence: Mutant peptide from Table 8
LIIPFIHLI

SEQ ID NO: 2999 - protein, 9 aa, synthetic construct
  REGION 1..9: note = Description of sequence: Mutant peptide from Table 8
LMFWASSSI

SEQ ID NO: 3000 - protein, 9 aa, synthetic construct
  REGION 1..9: note = Description of sequence: Mutant peptide from Table 8
MIISHLYLI

SEQ ID NO: 3001 - protein, 9 aa, synthetic construct
  REGION 1..9: note = Description of sequence: Mutant peptide from Table 8
FLIYLDVSV

SEQ ID NO: 3002 - protein, 9 aa, synthetic construct
  REGION 1..9: note = Description of sequence: Mutant peptide from Table 8
LLLIFNVSV

SEQ ID NO: 3003 - protein, 9 aa, synthetic construct
  REGION 1..9: note = Description of sequence: Mutant peptide from Table 8
SLLWMNLFV

SEQ ID NO: 3004 - protein, 9 aa, synthetic construct
  REGION 1..9: note = Description of sequence: Mutant peptide from Table 8
FTQEKWYHV

SEQ ID NO: 3005 - protein, 9 aa, synthetic construct
  REGION 1..9: note = Description of sequence: Mutant peptide from Table 8
NLFIQDISV

SEQ ID NO: 3006 - protein, 14 aa, synthetic construct
  REGION 1..14: note = Description of sequence: CDR3 from Table 9
CAYRSPPSSEKLVF

SEQ ID NO: 3007 - protein, 14 aa, synthetic construct
  REGION 1..14: note = Description of sequence: CDR3 from Table 9
CAVGAEDSNYQLIW

SEQ ID NO: 3008 - protein, 11 aa, synthetic construct
  REGION 1..11: note = Description of sequence: CDR3 from Table 9
CATDVNNDMRF

SEQ ID NO: 3009 - protein, 13 aa, synthetic construct
  REGION 1..13: note = Description of sequence: CDR3 from Table 9
CASFMDSNYQLIW

SEQ ID NO: 3010 - protein, 15 aa, synthetic construct
  REGION 1..15: note = Description of sequence: CDR3 from Table 9
CAMRASLQGAQKLVF

SEQ ID NO: 3011 - protein, 19 aa, synthetic construct
  REGION 1..19: note = Description of sequence: CDR3 from Table 9
CATDAQFLRSGAGSYQLTF

SEQ ID NO: 3012 - protein, 11 aa, synthetic construct
  REGION 1..11: note = Description of sequence: CDR3 from Table 9
CALWGTYKYIF

SEQ ID NO: 3013 - protein, 10 aa, synthetic construct
  REGION 1..10: note = Description of sequence: CDR3 from Table 9
CAVGGEKLTF

SEQ ID NO: 3014 - protein, 16 aa, synthetic construct
  REGION 1..16: note = Description of sequence: CDR3 from Table 9
CAASATGGTSYGKLTF

SEQ ID NO: 3015 - protein, 12 aa, synthetic construct
  REGION 1..12: note = Description of sequence: CDR3 from Table 9
CASEVGGYALNF

SEQ ID NO: 3016 - protein, 12 aa, synthetic construct
  REGION 1..12: note = Description of sequence: CDR3 from Table 9
CAPHSGYSTLTF

SEQ ID NO: 3017 - protein, 11 aa, synthetic construct
  REGION 1..11: note = Description of sequence: CDR3 from Table 9
CAVIGTDKLIF

SEQ ID NO: 3018 - protein, 15 aa, synthetic construct
  REGION 1..15: note = Description of sequence: CDR3 from Table 9
CAASHGSSNTGKLIF

SEQ ID NO: 3019 - protein, 11 aa, synthetic construct
  REGION 1..11: note = Description of sequence: CDR3 from Table 9
CAFSGNTPLVF

SEQ ID NO: 3020 - protein, 15 aa, synthetic construct
  REGION 1..15: note = Description of sequence: CDR3 from Table 9
CALSDRGGGADGLTF

SEQ ID NO: 3021 - protein, 13 aa, synthetic construct
  REGION 1..13: note = Description of sequence: CDR3 from Table 9
CAVGGDSSYKLIF

SEQ ID NO: 3022 - protein, 13 aa, synthetic construct
  REGION 1..13: note = Description of sequence: CDR3 from Table 9
CAAPPDSSYKLIF

SEQ ID NO: 3023 - protein, 14 aa, synthetic construct
  REGION 1..14: note = Description of sequence: CDR3 from Table 9
CAVTPTDSWGKLQF

SEQ ID NO: 3024 - protein, 16 aa, synthetic construct
  REGION 1..16: note = Description of sequence: CDR3 from Table 9
CAVRPLNTGTASKLTF

SEQ ID NO: 3025 - protein, 10 aa, synthetic construct
  REGION 1..10: note = Description of sequence: CDR3 from Table 9
CAVEGSRLTF

SEQ ID NO: 3026 - protein, 14 aa, synthetic construct
  REGION 1..14: note = Description of sequence: CDR3 from Table 9
CAVNAPTGFQKLVF

SEQ ID NO: 3027 - protein, 13 aa, synthetic construct
  REGION 1..13: note = Description of sequence: CDR3 from Table 9
CAFRQGGSEKLVF

SEQ ID NO: 3028 - protein, 16 aa, synthetic construct
  REGION 1..16: note = Description of sequence: CDR3 from Table 9
CAVREYSGGGADGLTF

SEQ ID NO: 3029 - protein, 14 aa, synthetic construct
  REGION 1..14: note = Description of sequence: CDR3 from Table 9
CALSEAYNNNDMRF

SEQ ID NO: 3030 - protein, 14 aa, synthetic construct
  REGION 1..14: note = Description of sequence: CDR3 from Table 9
CVVNVDNAGNMLTF

SEQ ID NO: 3031 - protein, 15 aa, synthetic construct
  REGION 1..15: note = Description of sequence: CDR3 from Table 9
CAARLYGGSQGNLIF

SEQ ID NO: 3032 - protein, 15 aa, synthetic construct
  REGION 1..15: note = Description of sequence: CDR3 from Table 9
CAVNEGGTSYGKLTF

SEQ ID NO: 3033 - protein, 13 aa, synthetic construct
  REGION 1..13: note = Description of sequence: CDR3 from Table 9
CAVFTGGGNKLTF

SEQ ID NO: 3034 - protein, 14 aa, synthetic construct
  REGION 1..14: note = Description of sequence: CDR3 from Table 9
CAISMDTGRRALTF

SEQ ID NO: 3035 - protein, 16 aa, synthetic construct
  REGION 1..16: note = Description of sequence: CDR3 from Table 9
CAVRLVGGTSYGKLTF

SEQ ID NO: 3036 - protein, 11 aa, synthetic construct
  REGION 1..11: note = Description of sequence: CDR3 from Table 9
CATLGDNDMRF

SEQ ID NO: 3037 - protein, 12 aa, synthetic construct
  REGION 1..12: note = Description of sequence: CDR3 from Table 9
CAMREGWGDMRF

SEQ ID NO: 3038 - protein, 16 aa, synthetic construct
  REGION 1..16: note = Description of sequence: CDR3 from Table 9
CALSGFGMDSSYKLIF

SEQ ID NO: 3039 - protein, 13 aa, synthetic construct
  REGION 1..13: note = Description of sequence: CDR3 from Table 9
CAGIGAGSYQLTF

SEQ ID NO: 3040 - protein, 13 aa, synthetic construct
  REGION 1..13: note = Description of sequence: CDR3 from Table 9
CAFLMDSSYKLIF

SEQ ID NO: 3041 - protein, 15 aa, synthetic construct
  REGION 1..15: note = Description of sequence: CDR3 from Table 9
CAFIGYGGSQGNLIF

SEQ ID NO: 3042 - protein, 13 aa, synthetic construct
  REGION 1..13: note = Description of sequence: CDR3 from Table 9
CAVLTSGYSTLTF

SEQ ID NO: 3043 - protein, 13 aa, synthetic construct
  REGION 1..13: note = Description of sequence: CDR3 from Table 9
CAFIIQGAQKLVF

SEQ ID NO: 3044 - protein, 12 aa, synthetic construct
  REGION 1..12: note = Description of sequence: CDR3 from Table 9
CAVNSGYSTLTF

SEQ ID NO: 3045 - protein, 16 aa, synthetic construct
  REGION 1..16: note = Description of sequence: CDR3 from Table 9
CAATEGGHNYGQNFVF

SEQ ID NO: 3046 - protein, 13 aa, synthetic construct
  REGION 1..13: note = Description of sequence: CDR3 from Table 9
CIVSPGGYQKVTF

SEQ ID NO: 3047 - protein, 11 aa, synthetic construct
  REGION 1..11: note = Description of sequence: CDR3 from Table 9
CAVNGGDKIIF

SEQ ID NO: 3048 - protein, 20 aa, synthetic construct
  REGION 1..20: note = Description of sequence: CDR3 from Table 9
CAMRERGSYAGGTSYGKLTF

SEQ ID NO: 3049 - protein, 13 aa, synthetic construct
  REGION 1..13: note = Description of sequence: CDR3 from Table 9
CAVNKANDYKLSF

SEQ ID NO: 3050 - protein, 12 aa, synthetic construct
  REGION 1..12: note = Description of sequence: CDR3 from Table 9
CAVTADGQKLLF

SEQ ID NO: 3051 - protein, 13 aa, synthetic construct
  REGION 1..13: note = Description of sequence: CDR3 from Table 9
CAVRDDNNNDMRF

SEQ ID NO: 3052 - protein, 15 aa, synthetic construct
  REGION 1..15: note = Description of sequence: CDR3 from Table 9
CALSEANTGGFKTIF

SEQ ID NO: 3053 - protein, 13 aa, synthetic construct
  REGION 1..13: note = Description of sequence: CDR3 from Table 9
CAMREGDRNQFYF

SEQ ID NO: 3054 - protein, 19 aa, synthetic construct
  REGION 1..19: note = Description of sequence: CDR3 from Table 9
CAMREAPENGGTSYGKLTF

SEQ ID NO: 3055 - protein, 12 aa, synthetic construct
  REGION 1..12: note = Description of sequence: CDR3 from Table 9
CAVRSNDYKLSF

SEQ ID NO: 3056 - protein, 12 aa, synthetic construct
  REGION 1..12: note = Description of sequence: CDR3 from Table 9
CVVRGGYNKLIF

SEQ ID NO: 3057 - protein, 12 aa, synthetic construct
  REGION 1..12: note = Description of sequence: CDR3 from Table 9
CAETGAGNMLTF

SEQ ID NO: 3058 - protein, 10 aa, synthetic construct
  REGION 1..10: note = Description of sequence: CDR3 from Table 9
CAFYDYKLSF

SEQ ID NO: 3059 - protein, 15 aa, synthetic construct
  REGION 1..15: note = Description of sequence: CDR3 from Table 9
CALSDPYSSASKIIF

SEQ ID NO: 3060 - protein, 13 aa, synthetic construct
  REGION 1..13: note = Description of sequence: CDR3 from Table 9
CAMREGQDARLMF

SEQ ID NO: 3061 - protein, 12 aa, synthetic construct
  REGION 1..12: note = Description of sequence: CDR3 from Table 9
CARPEAGNMLTF

SEQ ID NO: 3062 - protein, 15 aa, synthetic construct
  REGION 1..15: note = Description of sequence: CDR3 from Table 9
CATDEANFGNEKLTF

SEQ ID NO: 3063 - protein, 11 aa, synthetic construct
  REGION 1..11: note = Description of sequence: CDR3 from Table 9
CAVREGFKTIF

SEQ ID NO: 3064 - protein, 12 aa, synthetic construct
  REGION 1..12: note = Description of sequence: CDR3 from Table 9
CGRTDSWGKLQF

SEQ ID NO: 3065 - protein, 12 aa, synthetic construct
  REGION 1..12: note = Description of sequence: CDR3 from Table 9
CAYRKENNDMRF

SEQ ID NO: 3066 - protein, 12 aa, synthetic construct
  REGION 1..12: note = Description of sequence: CDR3 from Table 9
CAVIAGGFKTIF

SEQ ID NO: 3067 - protein, 16 aa, synthetic construct
  REGION 1..16: note = Description of sequence: CDR3 from Table 9
CAVGRRNSGGYQKVTF

SEQ ID NO: 3068 - protein, 15 aa, synthetic construct
  REGION 1..15: note = Description of sequence: CDR3 from Table 9
CATFPMKTSYDKVIF

SEQ ID NO: 3069 - protein, 14 aa, synthetic construct
  REGION 1..14: note = Description of sequence: CDR3 from Table 9
CAVGLGGGYNKLIF

SEQ ID NO: 3070 - protein, 13 aa, synthetic construct
  REGION 1..13: note = Description of sequence: CDR3 from Table 9
CAVNEERTDKLIF

SEQ ID NO: 3071 - protein, 13 aa, synthetic construct
  REGION 1..13: note = Description of sequence: CDR3 from Table 9
CAVASGGYNKLIF

SEQ ID NO: 3072 - protein, 14 aa, synthetic construct
  REGION 1..14: note = Description of sequence: CDR3 from Table 9
CAYRSGEYGNKLVF

SEQ ID NO: 3073 - protein, 10 aa, synthetic construct
  REGION 1..10: note = Description of sequence: CDR3 from Table 9
CAGNDYKLSF

SEQ ID NO: 3074 - protein, 13 aa, synthetic construct
  REGION 1..13: note = Description of sequence: CDR3 from Table 9
CALSDPNDYKLSF

SEQ ID NO: 3075 - protein, 14 aa, synthetic construct
  REGION 1..14: note = Description of sequence: CDR3 from Table 9
CAVYSGGGADGLTF

SEQ ID NO: 3076 - protein, 19 aa, synthetic construct
  REGION 1..19: note = Description of sequence: CDR3 from Table 9
CAMREGLSNYGGSQGNLIF

SEQ ID NO: 3077 - protein, 13 aa, synthetic construct
  REGION 1..13: note = Description of sequence: CDR3 from Table 9
CAASGGGAQKLVF

SEQ ID NO: 3078 - protein, 12 aa, synthetic construct
  REGION 1..12: note = Description of sequence: CDR3 from Table 9
CLLGGSNYKLTF

SEQ ID NO: 3079 - protein, 14 aa, synthetic construct
  REGION 1..14: note = Description of sequence: CDR3 from Table 9
CAMRAGYNTDKLIF

SEQ ID NO: 3080 - protein, 11 aa, synthetic construct
  REGION 1..11: note = Description of sequence: CDR3 from Table 9
CAVGSQGNLIF

SEQ ID NO: 3081 - protein, 11 aa, synthetic construct
  REGION 1..11: note = Description of sequence: CDR3 from Table 9
CAVSGYSTLTF

SEQ ID NO: 3082 - protein, 19 aa, synthetic construct
  REGION 1..19: note = Description of sequence: CDR3 from Table 9
CAEIPRSPMFSGGYNKLIF

SEQ ID NO: 3083 - protein, 14 aa, synthetic construct
  REGION 1..14: note = Description of sequence: CDR3 from Table 9
CAETLYNQGGKLIF

SEQ ID NO: 3084 - protein, 14 aa, synthetic construct
  REGION 1..14: note = Description of sequence: CDR3 from Table 9
CVVERGSTLGRLYF

SEQ ID NO: 3085 - protein, 10 aa, synthetic construct
  REGION 1..10: note = Description of sequence: CDR3 from Table 9
CAMGDARLMF

SEQ ID NO: 3086 - protein, 14 aa, synthetic construct
  REGION 1..14: note = Description of sequence: CDR3 from Table 9
CAVLNSGGYQKVTF

SEQ ID NO: 3087 - protein, 14 aa, synthetic construct
  REGION 1..14: note = Description of sequence: CDR3 from Table 9
CAVTDNNAGNMLTF

SEQ ID NO: 3088 - protein, 16 aa, synthetic construct
  REGION 1..16: note = Description of sequence: CDR3 from Table 9
CALDILISGGSYIPTF

SEQ ID NO: 3089 - protein, 15 aa, synthetic construct
  REGION 1..15: note = Description of sequence: CDR3 from Table 9
CALSSPTYNNNDMRF

SEQ ID NO: 3090 - protein, 14 aa, synthetic construct
  REGION 1..14: note = Description of sequence: CDR3 from Table 9
CAFESGGGADGLTF

SEQ ID NO: 3091 - protein, 11 aa, synthetic construct
  REGION 1..11: note = Description of sequence: CDR3 from Table 9
CAVRGGNDMRF

SEQ ID NO: 3092 - protein, 11 aa, synthetic construct
  REGION 1..11: note = Description of sequence: CDR3 from Table 9
CAVNTRTALIF

SEQ ID NO: 3093 - protein, 12 aa, synthetic construct
  REGION 1..12: note = Description of sequence: CDR3 from Table 9
CACMDSNYQLIW

SEQ ID NO: 3094 - protein, 14 aa, synthetic construct
  REGION 1..14: note = Description of sequence: CDR3 from Table 9
CAVTLTGGGNKLTF

SEQ ID NO: 3095 - protein, 19 aa, synthetic construct
  REGION 1..19: note = Description of sequence: CDR3 from Table 9
CAMRELSGNYGGSQGNLIF

SEQ ID NO: 3096 - protein, 13 aa, synthetic construct
  REGION 1..13: note = Description of sequence: CDR3 from Table 9
CAMSVPGYSTLTF

SEQ ID NO: 3097 - protein, 15 aa, synthetic construct
  REGION 1..15: note = Description of sequence: CDR3 from Table 9
CAMREGNTGGFKTIF

SEQ ID NO: 3098 - protein, 13 aa, synthetic construct
  REGION 1..13: note = Description of sequence: CDR3 from Table 9
CAVNAPGTYKYIF

SEQ ID NO: 3099 - protein, 13 aa, synthetic construct
  REGION 1..13: note = Description of sequence: CDR3 from Table 9
CAVSYDSNYQLIW

SEQ ID NO: 3100 - protein, 15 aa, synthetic construct
  REGION 1..15: note = Description of sequence: CDR3 from Table 9
CAVGARNTGFQKLVF

SEQ ID NO: 3101 - protein, 13 aa, synthetic construct
  REGION 1..13: note = Description of sequence: CDR3 from Table 9
CAAATGGGNKLTF

SEQ ID NO: 3102 - protein, 13 aa, synthetic construct
  REGION 1..13: note = Description of sequence: CDR3 from Table 9
CAVKGGSQGNLIF

SEQ ID NO: 3103 - protein, 18 aa, synthetic construct
  REGION 1..18: note = Description of sequence: CDR3 from Table 9
CAVRPTSPYGGSQGNLIF

SEQ ID NO: 3104 - protein, 11 aa, synthetic construct
  REGION 1..11: note = Description of sequence: CDR3 from Table 9
CAVKGTDKLIF

SEQ ID NO: 3105 - protein, 10 aa, synthetic construct
  REGION 1..10: note = Description of sequence: CDR3 from Table 9
CALGTHDMRF

SEQ ID NO: 3106 - protein, 14 aa, synthetic construct
  REGION 1..14: note = Description of sequence: CDR3 from Table 9
CARMSTDSWGKLQF

SEQ ID NO: 3107 - protein, 15 aa, synthetic construct
  REGION 1..15: note = Description of sequence: CDR3 from Table 9
CAAFMFSGGYNKLIF

SEQ ID NO: 3108 - protein, 13 aa, synthetic construct
  REGION 1..13: note = Description of sequence: CDR3 from Table 9
CVVSNQAGTALIF

SEQ ID NO: 3109 - protein, 14 aa, synthetic construct
  REGION 1..14: note = Description of sequence: CDR3 from Table 9
CAVRFNTGFQKLVF

SEQ ID NO: 3110 - protein, 13 aa, synthetic construct
  REGION 1..13: note = Description of sequence: CDR3 from Table 9
CAGRGMVGNKLVF

SEQ ID NO: 3111 - protein, 10 aa, synthetic construct
  REGION 1..10: note = Description of sequence: CDR3 from Table 9
CLIRDDKIIF

SEQ ID NO: 3112 - protein, 15 aa, synthetic construct
  REGION 1..15: note = Description of sequence: CDR3 from Table 9
CVVMPPGSGYSTLTF

SEQ ID NO: 3113 - protein, 14 aa, synthetic construct
  REGION 1..14: note = Description of sequence: CDR3 from Table 9
CAMRETDSSYKLIF

SEQ ID NO: 3114 - protein, 10 aa, synthetic construct
  REGION 1..10: note = Description of sequence: CDR3 from Table 9
CATGGPDMRF

SEQ ID NO: 3115 - protein, 15 aa, synthetic construct
  REGION 1..15: note = Description of sequence: CDR3 from Table 9
CALKNLGNYGQNFVF

SEQ ID NO: 3116 - protein, 13 aa, synthetic construct
  REGION 1..13: note = Description of sequence: CDR3 from Table 9
CAVQAGNTDKLIF

SEQ ID NO: 3117 - protein, 14 aa, synthetic construct
  REGION 1..14: note = Description of sequence: CDR3 from Table 9
CAASANNQGGKLIF

SEQ ID NO: 3118 - protein, 12 aa, synthetic construct
  REGION 1..12: note = Description of sequence: CDR3 from Table 9
CVVGPGANNLFF

SEQ ID NO: 3119 - protein, 14 aa, synthetic construct
  REGION 1..14: note = Description of sequence: CDR3 from Table 9
CAVSTGGGADGLTF

SEQ ID NO: 3120 - protein, 11 aa, synthetic construct
  REGION 1..11: note = Description of sequence: CDR3 from Table 9
CIVRVAGQFYF

SEQ ID NO: 3121 - protein, 12 aa, synthetic construct
  REGION 1..12: note = Description of sequence: CDR3 from Table 9
CAETPNDYKLSF

SEQ ID NO: 3122 - protein, 15 aa, synthetic construct
  REGION 1..15: note = Description of sequence: CDR3 from Table 9
CAFDFSSGSARQLTF

SEQ ID NO: 3123 - protein, 8 aa, synthetic construct
  REGION 1..8: note = Description of sequence: CDR3 from Table 9
CAVNRLVF

SEQ ID NO: 3124 - protein, 13 aa, synthetic construct
  REGION 1..13: note = Description of sequence: CDR3 from Table 9
CAVTKNTGNQFYF

SEQ ID NO: 3125 - protein, 14 aa, synthetic construct
  REGION 1..14: note = Description of sequence: CDR3 from Table 9
CAMSVSSNDYKLSF

SEQ ID NO: 3126 - protein, 13 aa, synthetic construct
  REGION 1..13: note = Description of sequence: CDR3 from Table 9
CAVRLGGSYIPTF

SEQ ID NO: 3127 - protein, 11 aa, synthetic construct
  REGION 1..11: note = Description of sequence: CDR3 from Table 9
CAMSGDYKLSF

SEQ ID NO: 3128 - protein, 15 aa, synthetic construct
  REGION 1..15: note = Description of sequence: CDR3 from Table 9
CGSADRGSTLGRLYF

SEQ ID NO: 3129 - protein, 16 aa, synthetic construct
  REGION 1..16: note = Description of sequence: CDR3 from Table 9
CALSEAEGYSGYALNF

SEQ ID NO: 3130 - protein, 14 aa, synthetic construct
  REGION 1..14: note = Description of sequence: CDR3 from Table 9
CAGVFGGSNYKLTF

SEQ ID NO: 3131 - protein, 14 aa, synthetic construct
  REGION 1..14: note = Description of sequence: CDR3 from Table 9
CAFILVANAGKSTF

SEQ ID NO: 3132 - protein, 15 aa, synthetic construct
  REGION 1..15: note = Description of sequence: CDR3 from Table 9
CAMREVAGAGNKLTF

SEQ ID NO: 3133 - protein, 11 aa, synthetic construct
  REGION 1..11: note = Description of sequence: CDR3 from Table 9
CAYGEDDKIIF

SEQ ID NO: 3134 - protein, 13 aa, synthetic construct
  REGION 1..13: note = Description of sequence: CDR3 from Table 9
CALRFNSSYKLIF

SEQ ID NO: 3135 - protein, 15 aa, synthetic construct
  REGION 1..15: note = Description of sequence: CDR3 from Table 9
CAESKESGGYQKVTF

SEQ ID NO: 3136 - protein, 15 aa, synthetic construct
  REGION 1..15: note = Description of sequence: CDR3 from Table 9
CAMREPRGGRRALTF

SEQ ID NO: 3137 - protein, 15 aa, synthetic construct
  REGION 1..15: note = Description of sequence: CDR3 from Table 9
CALRGFQDSNYQLIW

SEQ ID NO: 3138 - protein, 12 aa, synthetic construct
  REGION 1..12: note = Description of sequence: CDR3 from Table 9
CAVTSDGQKLLF

SEQ ID NO: 3139 - protein, 14 aa, synthetic construct
  REGION 1..14: note = Description of sequence: CDR3 from Table 9
CILRDPYNTDKLIF

SEQ ID NO: 3140 - protein, 17 aa, synthetic construct
  REGION 1..17: note = Description of sequence: CDR3 from Table 9
CAYRTGDSGAGSYQLTF

SEQ ID NO: 3141 - protein, 12 aa, synthetic construct
  REGION 1..12: note = Description of sequence: CDR3 from Table 9
CAFIWNDYKLSF

SEQ ID NO: 3142 - protein, 14 aa, synthetic construct
  REGION 1..14: note = Description of sequence: CDR3 from Table 9
CATDAEDSNYQLIW

SEQ ID NO: 3143 - protein, 16 aa, synthetic construct
  REGION 1..16: note = Description of sequence: CDR3 from Table 9
CAMREAFAGTASKLTF

SEQ ID NO: 3144 - protein, 14 aa, synthetic construct
  REGION 1..14: note = Description of sequence: CDR3 from Table 9
CAEIGVGGYQKVTF

SEQ ID NO: 3145 - protein, 16 aa, synthetic construct
  REGION 1..16: note = Description of sequence: CDR3 from Table 9
CAASGAGGTSYGKLTF

SEQ ID NO: 3146 - protein, 15 aa, synthetic construct
  REGION 1..15: note = Description of sequence: CDR3 from Table 9
CALSEASRDFQKLVF

SEQ ID NO: 3147 - protein, 10 aa, synthetic construct
  REGION 1..10: note = Description of sequence: CDR3 from Table 9
CAYTSNDMRF

SEQ ID NO: 3148 - protein, 16 aa, synthetic construct
  REGION 1..16: note = Description of sequence: CDR3 from Table 9
CAVPLAGGTSYGKLTF

SEQ ID NO: 3149 - protein, 16 aa, synthetic construct
  REGION 1..16: note = Description of sequence: CDR3 from Table 9
CALSEAGYSSASKIIF

SEQ ID NO: 3150 - protein, 15 aa, synthetic construct
  REGION 1..15: note = Description of sequence: CDR3 from Table 9
CAGLPDQTGANNLFF

SEQ ID NO: 3151 - protein, 15 aa, synthetic construct
  REGION 1..15: note = Description of sequence: CDR3 from Table 9
CAVAYSGGGADGLTF

SEQ ID NO: 3152 - protein, 11 aa, synthetic construct
  REGION 1..11: note = Description of sequence: CDR3 from Table 9
CVVNGNNDMRF

SEQ ID NO: 3153 - protein, 13 aa, synthetic construct
  REGION 1..13: note = Description of sequence: CDR3 from Table 9
CAASSSNTGKLIF

SEQ ID NO: 3154 - protein, 13 aa, synthetic construct
  REGION 1..13: note = Description of sequence: CDR3 from Table 9
CAVSDLAGQKLLF

SEQ ID NO: 3155 - protein, 10 aa, synthetic construct
  REGION 1..10: note = Description of sequence: CDR3 from Table 9
CAMGDYKLSF

SEQ ID NO: 3156 - protein, 14 aa, synthetic construct
  REGION 1..14: note = Description of sequence: CDR3 from Table 9
CAMSAGNQGGKLIF

SEQ ID NO: 3157 - protein, 19 aa, synthetic construct
  REGION 1..19: note = Description of sequence: CDR3 from Table 9
CAASSPLNAGGTSYGKLTF

SEQ ID NO: 3158 - protein, 12 aa, synthetic construct
  REGION 1..12: note = Description of sequence: CDR3 from Table 9
CAATGGSYIPTF

SEQ ID NO: 3159 - protein, 14 aa, synthetic construct
  REGION 1..14: note = Description of sequence: CDR3 from Table 9
CAVFGLSNDYKLSF

SEQ ID NO: 3160 - protein, 13 aa, synthetic construct
  REGION 1..13: note = Description of sequence: CDR3 from Table 9
CAVNAPDGQKLLF

SEQ ID NO: 3161 - protein, 12 aa, synthetic construct
  REGION 1..12: note = Description of sequence: CDR3 from Table 9
CAVPEGNTPLVF

SEQ ID NO: 3162 - protein, 13 aa, synthetic construct
  REGION 1..13: note = Description of sequence: CDR3 from Table 9
CAVVIGFGNVLHC

SEQ ID NO: 3163 - protein, 12 aa, synthetic construct
  REGION 1..12: note = Description of sequence: CDR3 from Table 9
CAVNGYGNKLVF

SEQ ID NO: 3164 - protein, 13 aa, synthetic construct
  REGION 1..13: note = Description of sequence: CDR3 from Table 9
CAVNQSGYSTLTF

SEQ ID NO: 3165 - protein, 14 aa, synthetic construct
  REGION 1..14: note = Description of sequence: CDR3 from Table 9
CAVRDIDSNYQLIW

SEQ ID NO: 3166 - protein, 14 aa, synthetic construct
  REGION 1..14: note = Description of sequence: CDR3 from Table 9
CAVRDIGDNNDMRF

SEQ ID NO: 3167 - protein, 15 aa, synthetic construct
  REGION 1..15: note = Description of sequence: CDR3 from Table 9
CAASESNFGNEKLTF

SEQ ID NO: 3168 - protein, 11 aa, synthetic construct
  REGION 1..11: note = Description of sequence: CDR3 from Table 9
CLLGDNNDMRF

SEQ ID NO: 3169 - protein, 17 aa, synthetic construct
  REGION 1..17: note = Description of sequence: CDR3 from Table 9
CAVGAWDSGGSNYKLTF

SEQ ID NO: 3170 - protein, 16 aa, synthetic construct
  REGION 1..16: note = Description of sequence: CDR3 from Table 9
CALSEAGSWGNTPLVF

SEQ ID NO: 3171 - protein, 12 aa, synthetic construct
  REGION 1..12: note = Description of sequence: CDR3 from Table 9
CAVSGGYNKLIF

SEQ ID NO: 3172 - protein, 13 aa, synthetic construct
  REGION 1..13: note = Description of sequence: CDR3 from Table 9
CALAGGGADGLTF

SEQ ID NO: 3173 - protein, 12 aa, synthetic construct
  REGION 1..12: note = Description of sequence: CDR3 from Table 9
CAVIYNFNKFYF

SEQ ID NO: 3174 - protein, 13 aa, synthetic construct
  REGION 1..13: note = Description of sequence: CDR3 from Table 9
CAGDQNTGNQFYF

SEQ ID NO: 3175 - protein, 15 aa, synthetic construct
  REGION 1..15: note = Description of sequence: CDR3 from Table 9
CALSPRSSNTGKLIF

SEQ ID NO: 3176 - protein, 13 aa, synthetic construct
  REGION 1..13: note = Description of sequence: CDR3 from Table 9
CAVKGGGADGLTF

SEQ ID NO: 3177 - protein, 11 aa, synthetic construct
  REGION 1..11: note = Description of sequence: CDR3 from Table 9
CALSTGNQFYF

SEQ ID NO: 3178 - protein, 13 aa, synthetic construct
  REGION 1..13: note = Description of sequence: CDR3 from Table 9
CALKTYSNYQLIW

SEQ ID NO: 3179 - protein, 12 aa, synthetic construct
  REGION 1..12: note = Description of sequence: CDR3 from Table 9
CAGFGGYQKVTF

SEQ ID NO: 3180 - protein, 11 aa, synthetic construct
  REGION 1..11: note = Description of sequence: CDR3 from Table 9
CAVNSNYQLIW

SEQ ID NO: 3181 - protein, 14 aa, synthetic construct
  REGION 1..14: note = Description of sequence: CDR3 from Table 9
CAVNMYGGYQKVTF

SEQ ID NO: 3182 - protein, 11 aa, synthetic construct
  REGION 1..11: note = Description of sequence: CDR3 from Table 9
CAVSEWDDMRF

SEQ ID NO: 3183 - protein, 14 aa, synthetic construct
  REGION 1..14: note = Description of sequence: CDR3 from Table 9
CAVDSGGGADGLTF

SEQ ID NO: 3184 - protein, 14 aa, synthetic construct
  REGION 1..14: note = Description of sequence: CDR3 from Table 9
CALSEAEGNTPLVF

SEQ ID NO: 3185 - protein, 17 aa, synthetic construct
  REGION 1..17: note = Description of sequence: CDR3 from Table 9
CAVEDRGGNTGFQKLVF

SEQ ID NO: 3186 - protein, 15 aa, synthetic construct
  REGION 1..15: note = Description of sequence: CDR3 from Table 9
CATDLWSGAGNMLTF

SEQ ID NO: 3187 - protein, 14 aa, synthetic construct
  REGION 1..14: note = Description of sequence: CDR3 from Table 9
CAPVSGGGADGLTF

SEQ ID NO: 3188 - protein, 13 aa, synthetic construct
  REGION 1..13: note = Description of sequence: CDR3 from Table 9
CAMRALYYGKLTF

SEQ ID NO: 3189 - protein, 12 aa, synthetic construct
  REGION 1..12: note = Description of sequence: CDR3 from Table 9
CAVNGGWGKLQF

SEQ ID NO: 3190 - protein, 12 aa, synthetic construct
  REGION 1..12: note = Description of sequence: CDR3 from Table 9
CAGALAFNDMRF

SEQ ID NO: 3191 - protein, 14 aa, synthetic construct
  REGION 1..14: note = Description of sequence: CDR3 from Table 9
CAVRDPYNFNKFYF

SEQ ID NO: 3192 - protein, 12 aa, synthetic construct
  REGION 1..12: note = Description of sequence: CDR3 from Table 9
CAGARRDDKIIF

SEQ ID NO: 3193 - protein, 12 aa, synthetic construct
  REGION 1..12: note = Description of sequence: CDR3 from Table 9
CAVKTSYDKVIF

SEQ ID NO: 3194 - protein, 15 aa, synthetic construct
  REGION 1..15: note = Description of sequence: CDR3 from Table 9
CAVTTTSGGYQKVTF

SEQ ID NO: 3195 - protein, 13 aa, synthetic construct
  REGION 1..13: note = Description of sequence: CDR3 from Table 9
CAVNAGNTGKLIF

SEQ ID NO: 3196 - protein, 11 aa, synthetic construct
  REGION 1..11: note = Description of sequence: CDR3 from Table 9
CAVSNDYKLSF

SEQ ID NO: 3197 - protein, 13 aa, synthetic construct
  REGION 1..13: note = Description of sequence: CDR3 from Table 9
CAVQGGGADGLTF

SEQ ID NO: 3198 - protein, 12 aa, synthetic construct
  REGION 1..12: note = Description of sequence: CDR3 from Table 9
CAVIANNNDMRF

SEQ ID NO: 3199 - protein, 7 aa, synthetic construct
  REGION 1..7: note = Description of sequence: CDR3 from Table 9
QGGKLIF

SEQ ID NO: 3200 - protein, 13 aa, synthetic construct
  REGION 1..13: note = Description of sequence: CDR3 from Table 9
CAAWNTGFQKLVF

SEQ ID NO: 3201 - protein, 12 aa, synthetic construct
  REGION 1..12: note = Description of sequence: CDR3 from Table 9
CAVNVNDYKLSF

SEQ ID NO: 3202 - protein, 15 aa, synthetic construct
  REGION 1..15: note = Description of sequence: CDR3 from Table 9
CAASWEQGSNYKLTF

SEQ ID NO: 3203 - protein, 14 aa, synthetic construct
  REGION 1..14: note = Description of sequence: CDR3 from Table 9
CAPSAGGGSEKLVF

SEQ ID NO: 3204 - protein, 14 aa, synthetic construct
  REGION 1..14: note = Description of sequence: CDR3 from Table 9
CALSDPGFGNVLHC

SEQ ID NO: 3205 - protein, 5 aa, synthetic construct
  REGION 1..5: note = Description of sequence: CDR3 from Table 9
YQLTF

SEQ ID NO: 3206 - protein, 13 aa, synthetic construct
  REGION 1..13: note = Description of sequence: CDR3 from Table 9
CAVRSYNTDKLIF

SEQ ID NO: 3207 - protein, 15 aa, synthetic construct
  REGION 1..15: note = Description of sequence: CDR3 from Table 9
CAVDETTDSWGKLQF

SEQ ID NO: 3208 - protein, 13 aa, synthetic construct
  REGION 1..13: note = Description of sequence: CDR3 from Table 9
CAHLSGGYNKLIF

SEQ ID NO: 3209 - protein, 14 aa, synthetic construct
  REGION 1..14: note = Description of sequence: CDR3 from Table 9
CATDANNAGNMLTF

SEQ ID NO: 3210 - protein, 14 aa, synthetic construct
  REGION 1..14: note = Description of sequence: CDR3 from Table 9
CALSEEADNNDMRF

SEQ ID NO: 3211 - protein, 17 aa, synthetic construct
  REGION 1..17: note = Description of sequence: CDR3 from Table 9
CAYRRMVSGGSNYKLTF

SEQ ID NO: 3212 - protein, 12 aa, synthetic construct
  REGION 1..12: note = Description of sequence: CDR3 from Table 9
CAYREGAQKLVF

SEQ ID NO: 3213 - protein, 12 aa, synthetic construct
  REGION 1..12: note = Description of sequence: CDR3 from Table 9
CAVGSPDYKLSF

SEQ ID NO: 3214 - protein, 13 aa, synthetic construct
  REGION 1..13: note = Description of sequence: CDR3 from Table 9
CAVVQTSGSRLTF

SEQ ID NO: 3215 - protein, 17 aa, synthetic construct
  REGION 1..17: note = Description of sequence: CDR3 from Table 9
CATDAWGHGGSQGNLIF

SEQ ID NO: 3216 - protein, 11 aa, synthetic construct
  REGION 1..11: note = Description of sequence: CDR3 from Table 9
CAYRSDGDMRF

SEQ ID NO: 3217 - protein, 14 aa, synthetic construct
  REGION 1..14: note = Description of sequence: CDR3 from Table 9
CAVRDGGSASKIIF

SEQ ID NO: 3218 - protein, 13 aa, synthetic construct
  REGION 1..13: note = Description of sequence: CDR3 from Table 9
CAMRERGYSTLTF

SEQ ID NO: 3219 - protein, 15 aa, synthetic construct
  REGION 1..15: note = Description of sequence: CDR3 from Table 9
CAMSLSNFGNEKLTF

SEQ ID NO: 3220 - protein, 13 aa, synthetic construct
  REGION 1..13: note = Description of sequence: CDR3 from Table 9
CAVVKTSYDKVIF

SEQ ID NO: 3221 - protein, 14 aa, synthetic construct
  REGION 1..14: note = Description of sequence: CDR3 from Table 9
CAVPRNSGNTPLVF

SEQ ID NO: 3222 - protein, 13 aa, synthetic construct
  REGION 1..13: note = Description of sequence: CDR3 from Table 9
CAVNDGTASKLTF

SEQ ID NO: 3223 - protein, 10 aa, synthetic construct
  REGION 1..10: note = Description of sequence: CDR3 from Table 9
CAVTVDDMRF

SEQ ID NO: 3224 - protein, 15 aa, synthetic construct
  REGION 1..15: note = Description of sequence: CDR3 from Table 9
CAVSLLSGGYNKLIF

SEQ ID NO: 3225 - protein, 12 aa, synthetic construct
  REGION 1..12: note = Description of sequence: CDR3 from Table 9
CAESLDTDKLIF

SEQ ID NO: 3226 - protein, 10 aa, synthetic construct
  REGION 1..10: note = Description of sequence: CDR3 from Table 9
CAVDNARLMF

SEQ ID NO: 3227 - protein, 14 aa, synthetic construct
  REGION 1..14: note = Description of sequence: CDR3 from Table 9
CAVNGGGSQGNLIF

SEQ ID NO: 3228 - protein, 17 aa, synthetic construct
  REGION 1..17: note = Description of sequence: CDR3 from Table 9
CALSEIVPTSGTYKYIF

SEQ ID NO: 3229 - protein, 15 aa, synthetic construct
  REGION 1..15: note = Description of sequence: CDR3 from Table 9
CLVGDSWNYGQNFVF

SEQ ID NO: 3230 - protein, 11 aa, synthetic construct
  REGION 1..11: note = Description of sequence: CDR3 from Table 9
CAMGSGYALNF

SEQ ID NO: 3231 - protein, 12 aa, synthetic construct
  REGION 1..12: note = Description of sequence: CDR3 from Table 9
CAVRDYGQKLLF

SEQ ID NO: 3232 - protein, 11 aa, synthetic construct
  REGION 1..11: note = Description of sequence: CDR3 from Table 9
CAVTPGTALIF

SEQ ID NO: 3233 - protein, 10 aa, synthetic construct
  REGION 1..10: note = Description of sequence: CDR3 from Table 9
CAVKGNDMRF

SEQ ID NO: 3234 - protein, 13 aa, synthetic construct
  REGION 1..13: note = Description of sequence: CDR3 from Table 9
CAVFMEYGNKLVF

SEQ ID NO: 3235 - protein, 13 aa, synthetic construct
  REGION 1..13: note = Description of sequence: CDR3 from Table 9
CGTGGAGDYKLSF

SEQ ID NO: 3236 - protein, 11 aa, synthetic construct
  REGION 1..11: note = Description of sequence: CDR3 from Table 9
CAPFNTDKLIF

SEQ ID NO: 3237 - protein, 11 aa, synthetic construct
  REGION 1..11: note = Description of sequence: CDR3 from Table 9
CAVRVGGDMRF

SEQ ID NO: 3238 - protein, 14 aa, synthetic construct
  REGION 1..14: note = Description of sequence: CDR3 from Table 9
CAVDLEVGGNKLVF

SEQ ID NO: 3239 - protein, 15 aa, synthetic construct
  REGION 1..15: note = Description of sequence: CDR3 from Table 9
CAMRELLFGNEKLTF

SEQ ID NO: 3240 - protein, 13 aa, synthetic construct
  REGION 1..13: note = Description of sequence: CDR3 from Table 9
CAYSPYNNNDMRF

SEQ ID NO: 3241 - protein, 14 aa, synthetic construct
  REGION 1..14: note = Description of sequence: CDR3 from Table 9
CASYSGGGADGLTF

SEQ ID NO: 3242 - protein, 14 aa, synthetic construct
  REGION 1..14: note = Description of sequence: CDR3 from Table 9
CAMREGPGNTPLVF

SEQ ID NO: 3243 - protein, 12 aa, synthetic construct
  REGION 1..12: note = Description of sequence: CDR3 from Table 9
CAVRPDGYALNF

SEQ ID NO: 3244 - protein, 16 aa, synthetic construct
  REGION 1..16: note = Description of sequence: CDR3 from Table 9
CAVISTGGTSYGKLTF

SEQ ID NO: 3245 - protein, 12 aa, synthetic construct
  REGION 1..12: note = Description of sequence: CDR3 from Table 9
CAVGEDGQNFVF

SEQ ID NO: 3246 - protein, 15 aa, synthetic construct
  REGION 1..15: note = Description of sequence: CDR3 from Table 9
CAVAGVISGTYKYIF

SEQ ID NO: 3247 - protein, 12 aa, synthetic construct
  REGION 1..12: note = Description of sequence: CDR3 from Table 9
CAERDGGFKTIF

SEQ ID NO: 3248 - protein, 13 aa, synthetic construct
  REGION 1..13: note = Description of sequence: CDR3 from Table 9
CAVIWYNNNDMRF

SEQ ID NO: 3249 - protein, 15 aa, synthetic construct
  REGION 1..15: note = Description of sequence: CDR3 from Table 9
CALSDPLGRDDKIIF

SEQ ID NO: 3250 - protein, 12 aa, synthetic construct
  REGION 1..12: note = Description of sequence: CDR3 from Table 9
CAPPRRDDKIIF

SEQ ID NO: 3251 - protein, 11 aa, synthetic construct
  REGION 1..11: note = Description of sequence: CDR3 from Table 9
CAVNRDDKIIF

SEQ ID NO: 3252 - protein, 13 aa, synthetic construct
  REGION 1..13: note = Description of sequence: CDR3 from Table 9
CAMGDNYGQNFVF

SEQ ID NO: 3253 - protein, 13 aa, synthetic construct
  REGION 1..13: note = Description of sequence: CDR3 from Table 9
CAMKGAGSYQLTF

SEQ ID NO: 3254 - protein, 10 aa, synthetic construct
  REGION 1..10: note = Description of sequence: CDR3 from Table 9
CASRPDKLIF

SEQ ID NO: 3255 - protein, 13 aa, synthetic construct
  REGION 1..13: note = Description of sequence: CDR3 from Table 9
CAVTDNYGQNFVF

SEQ ID NO: 3256 - protein, 10 aa, synthetic construct
  REGION 1..10: note = Description of sequence: CDR3 from Table 9
CAMREGDVSF

SEQ ID NO: 3257 - protein, 10 aa, synthetic construct
  REGION 1..10: note = Description of sequence: CDR3 from Table 9
CALNNARLMF

SEQ ID NO: 3258 - protein, 13 aa, synthetic construct
  REGION 1..13: note = Description of sequence: CDR3 from Table 9
CAVNRDSGYALNF

SEQ ID NO: 3259 - protein, 13 aa, synthetic construct
  REGION 1..13: note = Description of sequence: CDR3 from Table 9
CAVTTDSWGKLQF

SEQ ID NO: 3260 - protein, 14 aa, synthetic construct
  REGION 1..14: note = Description of sequence: CDR3 from Table 9
CLVARSYNNNDMRF

SEQ ID NO: 3261 - protein, 13 aa, synthetic construct
  REGION 1..13: note = Description of sequence: CDR3 from Table 9
CAVRGSGTYKYIF

SEQ ID NO: 3262 - protein, 9 aa, synthetic construct
  REGION 1..9: note = Description of sequence: CDR3 from Table 9
CGAGNMLTF

SEQ ID NO: 3263 - protein, 11 aa, synthetic construct
  REGION 1..11: note = Description of sequence: CDR3 from Table 9
CAFAGTYKYIF

SEQ ID NO: 3264 - protein, 12 aa, synthetic construct
  REGION 1..12: note = Description of sequence: CDR3 from Table 9
CAYRTSYDKVIF

SEQ ID NO: 3265 - protein, 13 aa, synthetic construct
  REGION 1..13: note = Description of sequence: CDR3 from Table 9
CAAMGDSSYKLIF

SEQ ID NO: 3266 - protein, 17 aa, synthetic construct
  REGION 1..17: note = Description of sequence: CDR3 from Table 9
CAMSTLDQIQGAQKLVF

SEQ ID NO: 3267 - protein, 12 aa, synthetic construct
  REGION 1..12: note = Description of sequence: CDR3 from Table 9
CAAAPNDYKLSF

SEQ ID NO: 3268 - protein, 13 aa, synthetic construct
  REGION 1..13: note = Description of sequence: CDR3 from Table 9
CAVNPGSQGNLIF

SEQ ID NO: 3269 - protein, 16 aa, synthetic construct
  REGION 1..16: note = Description of sequence: CDR3 from Table 9
CILRDSSGGGADGLTF

SEQ ID NO: 3270 - protein, 15 aa, synthetic construct
  REGION 1..15: note = Description of sequence: CDR3 from Table 9
CAVDMRADSNYQLIW

SEQ ID NO: 3271 - protein, 15 aa, synthetic construct
  REGION 1..15: note = Description of sequence: CDR3 from Table 9
CAGRSTGAGSYQLTF

SEQ ID NO: 3272 - protein, 13 aa, synthetic construct
  REGION 1..13: note = Description of sequence: CDR3 from Table 9
CALSDRGAQKLVF

SEQ ID NO: 3273 - protein, 14 aa, synthetic construct
  REGION 1..14: note = Description of sequence: CDR3 from Table 9
CAVSPLDGYNKLIF

SEQ ID NO: 3274 - protein, 10 aa, synthetic construct
  REGION 1..10: note = Description of sequence: CDR3 from Table 9
PYSSASKIIF

SEQ ID NO: 3275 - protein, 14 aa, synthetic construct
  REGION 1..14: note = Description of sequence: CDR3 from Table 9
CIVRLSNTGNQFYF

SEQ ID NO: 3276 - protein, 15 aa, synthetic construct
  REGION 1..15: note = Description of sequence: CDR3 from Table 9
CAARDPYNQGGKLIF

SEQ ID NO: 3277 - protein, 14 aa, synthetic construct
  REGION 1..14: note = Description of sequence: CDR3 from Table 9
CAVVLTDSWGKLQF

SEQ ID NO: 3278 - protein, 11 aa, synthetic construct
  REGION 1..11: note = Description of sequence: CDR3 from Table 9
CAVRPYDKVIF

SEQ ID NO: 3279 - protein, 15 aa, synthetic construct
  REGION 1..15: note = Description of sequence: CDR3 from Table 9
CAGLDQPGGSYIPTF

SEQ ID NO: 3280 - protein, 12 aa, synthetic construct
  REGION 1..12: note = Description of sequence: CDR3 from Table 9
CVVSGGYQKVTF

SEQ ID NO: 3281 - protein, 14 aa, synthetic construct
  REGION 1..14: note = Description of sequence: CDR3 from Table 9
CILNVPGGYQKVTF

SEQ ID NO: 3282 - protein, 15 aa, synthetic construct
  REGION 1..15: note = Description of sequence: CDR3 from Table 9
CAASPATSGTYKYIF

SEQ ID NO: 3283 - protein, 15 aa, synthetic construct
  REGION 1..15: note = Description of sequence: CDR3 from Table 9
CAVDRVTGGGNKLTF

SEQ ID NO: 3284 - protein, 14 aa, synthetic construct
  REGION 1..14: note = Description of sequence: CDR3 from Table 9
CLVVSNSSASKIIF

SEQ ID NO: 3285 - protein, 14 aa, synthetic construct
  REGION 1..14: note = Description of sequence: CDR3 from Table 9
CIVRAALYNNDMRF

SEQ ID NO: 3286 - protein, 14 aa, synthetic construct
  REGION 1..14: note = Description of sequence: CDR3 from Table 9
CAETVNTGFQKLVF

SEQ ID NO: 3287 - protein, 9 aa, synthetic construct
  REGION 1..9: note = Description of sequence: CDR3 from Table 9
CAANEKLVF

SEQ ID NO: 3288 - protein, 8 aa, synthetic construct
  REGION 1..8: note = Description of sequence: CDR3 from Table 9
CAVKGMRF

SEQ ID NO: 3289 - protein, 8 aa, synthetic construct
  REGION 1..8: note = Description of sequence: CDR3 from Table 9
CAGTHMRF

SEQ ID NO: 3290 - protein, 16 aa, synthetic construct
  REGION 1..16: note = Description of sequence: CDR3 from Table 9
CAILPDSGAGSYQLTF

SEQ ID NO: 3291 - protein, 15 aa, synthetic construct
  REGION 1..15: note = Description of sequence: CDR3 from Table 9
CGADNSGGGADGLTF

SEQ ID NO: 3292 - protein, 14 aa, synthetic construct
  REGION 1..14: note = Description of sequence: CDR3 from Table 9
CATDALSGTYKYIF

SEQ ID NO: 3293 - protein, 14 aa, synthetic construct
  REGION 1..14: note = Description of sequence: CDR3 from Table 9
CAMRESYNNNDMRF

SEQ ID NO: 3294 - protein, 12 aa, synthetic construct
  REGION 1..12: note = Description of sequence: CDR3 from Table 9
CALNNAGNMLTF

SEQ ID NO: 3295 - protein, 15 aa, synthetic construct
  REGION 1..15: note = Description of sequence: CDR3 from Table 9
CAVINSGAGSYQLTF

SEQ ID NO: 3296 - protein, 10 aa, synthetic construct
  REGION 1..10: note = Description of sequence: CDR3 from Table 9
CAYRTQKLVF

SEQ ID NO: 3297 - protein, 15 aa, synthetic construct
  REGION 1..15: note = Description of sequence: CDR3 from Table 9
CALILTQGGSEKLVF

SEQ ID NO: 3298 - protein, 13 aa, synthetic construct
  REGION 1..13: note = Description of sequence: CDR3 from Table 9
CARITGGGNKLTF

SEQ ID NO: 3299 - protein, 14 aa, synthetic construct
  REGION 1..14: note = Description of sequence: CDR3 from Table 9
CAVNALYNFNKFYF

SEQ ID NO: 3300 - protein, 12 aa, synthetic construct
  REGION 1..12: note = Description of sequence: CDR3 from Table 9
CAYGTGANNLFF

SEQ ID NO: 3301 - protein, 10 aa, synthetic construct
  REGION 1..10: note = Description of sequence: CDR3 from Table 9
CAVSADKLIF

SEQ ID NO: 3302 - protein, 16 aa, synthetic construct
  REGION 1..16: note = Description of sequence: CDR3 from Table 9
CAMRAITQGGSERLVF

SEQ ID NO: 3303 - protein, 12 aa, synthetic construct
  REGION 1..12: note = Description of sequence: CDR3 from Table 9
CATDQGNTPLVF

SEQ ID NO: 3304 - protein, 10 aa, synthetic construct
  REGION 1..10: note = Description of sequence: CDR3 from Table 9
CAYIGYDMRF

SEQ ID NO: 3305 - protein, 12 aa, synthetic construct
  REGION 1..12: note = Description of sequence: CDR3 from Table 9
CAIADSWGKLQF

SEQ ID NO: 3306 - protein, 14 aa, synthetic construct
  REGION 1..14: note = Description of sequence: CDR3 from Table 9
CALSEQTSYDKVIF

SEQ ID NO: 3307 - protein, 17 aa, synthetic construct
  REGION 1..17: note = Description of sequence: CDR3 from Table 9
CAPTRNAGGTSYGKLTF

SEQ ID NO: 3308 - protein, 12 aa, synthetic construct
  REGION 1..12: note = Description of sequence: CDR3 from Table 9
CVVKGGYNKLIF

SEQ ID NO: 3309 - protein, 12 aa, synthetic construct
  REGION 1..12: note = Description of sequence: CDR3 from Table 9
CAVVHGGQNFVF

SEQ ID NO: 3310 - protein, 11 aa, synthetic construct
  REGION 1..11: note = Description of sequence: CDR3 from Table 9
CAMEGNEKLTF

SEQ ID NO: 3311 - protein, 11 aa, synthetic construct
  REGION 1..11: note = Description of sequence: CDR3 from Table 9
CAPHSNYQLIW

SEQ ID NO: 3312 - protein, 16 aa, synthetic construct
  REGION 1..16: note = Description of sequence: CDR3 from Table 9
CAVAPGSGGSNYKLTF

SEQ ID NO: 3313 - protein, 16 aa, synthetic construct
  REGION 1..16: note = Description of sequence: CDR3 from Table 9
CAMREVYNNAGNMLTF

SEQ ID NO: 3314 - protein, 11 aa, synthetic construct
  REGION 1..11: note = Description of sequence: CDR3 from Table 9
CALSGYSTLTF

SEQ ID NO: 3315 - protein, 12 aa, synthetic construct
  REGION 1..12: note = Description of sequence: CDR3 from Table 9
CAAENRDDKIIF

SEQ ID NO: 3316 - protein, 11 aa, synthetic construct
  REGION 1..11: note = Description of sequence: CDR3 from Table 9
CALKGNNRLAF

SEQ ID NO: 3317 - protein, 11 aa, synthetic construct
  REGION 1..11: note = Description of sequence: CDR3 from Table 9
CDPIPTRRLSF

SEQ ID NO: 3318 - protein, 14 aa, synthetic construct
  REGION 1..14: note = Description of sequence: CDR3 from Table 9
CAMSVGNAGNMLTF

SEQ ID NO: 3319 - protein, 12 aa, synthetic construct
  REGION 1..12: note = Description of sequence: CDR3 from Table 9
CLVSGGYNKLIF

SEQ ID NO: 3320 - protein, 11 aa, synthetic construct
  REGION 1..11: note = Description of sequence: CDR3 from Table 9
CAMRGYQKVTF

SEQ ID NO: 3321 - protein, 15 aa, synthetic construct
  REGION 1..15: note = Description of sequence: CDR3 from Table 9
CALSEASEYGNKLVF

SEQ ID NO: 3322 - protein, 13 aa, synthetic construct
  REGION 1..13: note = Description of sequence: CDR3 from Table 9
CATEVQGAQKLVF

SEQ ID NO: 3323 - protein, 13 aa, synthetic construct
  REGION 1..13: note = Description of sequence: CDR3 from Table 9
CATDAEGAQKLVF

SEQ ID NO: 3324 - protein, 10 aa, synthetic construct
  REGION 1..10: note = Description of sequence: CDR3 from Table 9
CAFRFNKFYF

SEQ ID NO: 3325 - protein, 12 aa, synthetic construct
  REGION 1..12: note = Description of sequence: CDR3 from Table 9
CAVLDGYNKLIF

SEQ ID NO: 3326 - protein, 11 aa, synthetic construct
  REGION 1..11: note = Description of sequence: CDR3 from Table 9
CAYRSAWDMRF

SEQ ID NO: 3327 - protein, 13 aa, synthetic construct
  REGION 1..13: note = Description of sequence: CDR3 from Table 9
CALSGGGADGLTF

SEQ ID NO: 3328 - protein, 12 aa, synthetic construct
  REGION 1..12: note = Description of sequence: CDR3 from Table 9
CVVSGGYNKLIF

SEQ ID NO: 3329 - protein, 11 aa, synthetic construct
  REGION 1..11: note = Description of sequence: CDR3 from Table 9
CAVNLYARLMF

SEQ ID NO: 3330 - protein, 11 aa, synthetic construct
  REGION 1..11: note = Description of sequence: CDR3 from Table 9
CVDGGYQKVTF

SEQ ID NO: 3331 - protein, 11 aa, synthetic construct
  REGION 1..11: note = Description of sequence: CDR3 from Table 9
CAVKNDYKLSF

SEQ ID NO: 3332 - protein, 14 aa, synthetic construct
  REGION 1..14: note = Description of sequence: CDR3 from Table 9
CAEAISGGYNKLIF

SEQ ID NO: 3333 - protein, 15 aa, synthetic construct
  REGION 1..15: note = Description of sequence: CDR3 from Table 9
CAVNKPNQAGTALIF

SEQ ID NO: 3334 - protein, 13 aa, synthetic construct
  REGION 1..13: note = Description of sequence: CDR3 from Table 9
CAVKNTGFQKLVF

SEQ ID NO: 3335 - protein, 15 aa, synthetic construct
  REGION 1..15: note = Description of sequence: CDR3 from Table 9
CAVSHLIAGGFKTIF

SEQ ID NO: 3336 - protein, 10 aa, synthetic construct
  REGION 1..10: note = Description of sequence: CDR3 from Table 9
CAVNEDKIIF

SEQ ID NO: 3337 - protein, 12 aa, synthetic construct
  REGION 1..12: note = Description of sequence: CDR3 from Table 9
CVVNGNNNDMRF

SEQ ID NO: 3338 - protein, 15 aa, synthetic construct
  REGION 1..15: note = Description of sequence: CDR3 from Table 9
CAVEGSNFGNEKLTF

SEQ ID NO: 3339 - protein, 10 aa, synthetic construct
  REGION 1..10: note = Description of sequence: CDR3 from Table 9
CAVSNNDMRF

SEQ ID NO: 3340 - protein, 13 aa, synthetic construct
  REGION 1..13: note = Description of sequence: CDR3 from Table 9
CAVLLSNDYKLSF

SEQ ID NO: 3341 - protein, 13 aa, synthetic construct
  REGION 1..13: note = Description of sequence: CDR3 from Table 9
CAMEDTNAGKSTF

SEQ ID NO: 3342 - protein, 17 aa, synthetic construct
  REGION 1..17: note = Description of sequence: CDR3 from Table 9
CALSDGEFYNQGGKLIF

SEQ ID NO: 3343 - protein, 11 aa, synthetic construct
  REGION 1..11: note = Description of sequence: CDR3 from Table 9
CVVILNARLMF

SEQ ID NO: 3344 - protein, 16 aa, synthetic construct
  REGION 1..16: note = Description of sequence: CDR3 from Table 9
CGTDNAGGTSYGKLTF

SEQ ID NO: 3345 - protein, 14 aa, synthetic construct
  REGION 1..14: note = Description of sequence: CDR3 from Table 9
CAASMGQAGTALIF

SEQ ID NO: 3346 - protein, 13 aa, synthetic construct
  REGION 1..13: note = Description of sequence: CDR3 from Table 9
CAVSGGGADGLTF

SEQ ID NO: 3347 - protein, 16 aa, synthetic construct
  REGION 1..16: note = Description of sequence: CDR3 from Table 9
CAMREGRDFGNEKLTF

SEQ ID NO: 3348 - protein, 12 aa, synthetic construct
  REGION 1..12: note = Description of sequence: CDR3 from Table 9
CATDAGDDKIIF

SEQ ID NO: 3349 - protein, 14 aa, synthetic construct
  REGION 1..14: note = Description of sequence: CDR3 from Table 9
CALSEWGSQGNLIF

SEQ ID NO: 3350 - protein, 15 aa, synthetic construct
  REGION 1..15: note = Description of sequence: CDR3 from Table 9
CAMREGGDSSYKLIF

SEQ ID NO: 3351 - protein, 13 aa, synthetic construct
  REGION 1..13: note = Description of sequence: CDR3 from Table 9
CALSEADDYKLSF

SEQ ID NO: 3352 - protein, 15 aa, synthetic construct
  REGION 1..15: note = Description of sequence: CDR3 from Table 9
CAVKSGAGFGNVLHC

SEQ ID NO: 3353 - protein, 16 aa, synthetic construct
  REGION 1..16: note = Description of sequence: CDR3 from Table 9
CAVNWNYGGSQGNLIF

SEQ ID NO: 3354 - protein, 13 aa, synthetic construct
  REGION 1..13: note = Description of sequence: CDR3 from Table 9
CAVEPGDDYKLSF

SEQ ID NO: 3355 - protein, 12 aa, synthetic construct
  REGION 1..12: note = Description of sequence: CDR3 from Table 9
CAVNQAGTALIF

SEQ ID NO: 3356 - protein, 16 aa, synthetic construct
  REGION 1..16: note = Description of sequence: CDR3 from Table 9
CVVNLNYGGSQGNLIF

SEQ ID NO: 3357 - protein, 13 aa, synthetic construct
  REGION 1..13: note = Description of sequence: CDR3 from Table 9
CAEGLEDTGKLIF

SEQ ID NO: 3358 - protein, 17 aa, synthetic construct
  REGION 1..17: note = Description of sequence: CDR3 from Table 9
CAMREAHDNFGNEKLTF

SEQ ID NO: 3359 - protein, 12 aa, synthetic construct
  REGION 1..12: note = Description of sequence: CDR3 from Table 9
CAVRDEDDKIIF

SEQ ID NO: 3360 - protein, 15 aa, synthetic construct
  REGION 1..15: note = Description of sequence: CDR3 from Table 9
CAVSARAFGNEKLTF

SEQ ID NO: 3361 - protein, 12 aa, synthetic construct
  REGION 1..12: note = Description of sequence: CDR3 from Table 9
CAVEDNFNKFYF

SEQ ID NO: 3362 - protein, 16 aa, synthetic construct
  REGION 1..16: note = Description of sequence: CDR3 from Table 9
CALSEAYSGSARQLTF

SEQ ID NO: 3363 - protein, 13 aa, synthetic construct
  REGION 1..13: note = Description of sequence: CDR3 from Table 9
CAVKSEYGNKLVF

SEQ ID NO: 3364 - protein, 15 aa, synthetic construct
  REGION 1..15: note = Description of sequence: CDR3 from Table 9
CALSEGNFGNEKLTF

SEQ ID NO: 3365 - protein, 15 aa, synthetic construct
  REGION 1..15: note = Description of sequence: CDR3 from Table 9
CAMRGGMDSSYKLIF

SEQ ID NO: 3366 - protein, 13 aa, synthetic construct
  REGION 1..13: note = Description of sequence: CDR3 from Table 9
CAVDGQAGTALIF

SEQ ID NO: 3367 - protein, 11 aa, synthetic construct
  REGION 1..11: note = Description of sequence: CDR3 from Table 9
CAMTSFQKLVF

SEQ ID NO: 3368 - protein, 16 aa, synthetic construct
  REGION 1..16: note = Description of sequence: CDR3 from Table 9
CAVRDTRSYNTDKLIF

SEQ ID NO: 3369 - protein, 15 aa, synthetic construct
  REGION 1..15: note = Description of sequence: CDR3 from Table 9
CIVRIIKAAGNKLTF

SEQ ID NO: 3370 - protein, 13 aa, synthetic construct
  REGION 1..13: note = Description of sequence: CDR3 from Table 9
CAMRESNNARLMF

SEQ ID NO: 3371 - protein, 15 aa, synthetic construct
  REGION 1..15: note = Description of sequence: CDR3 from Table 9
CAVEMTTDSWGKLQF

SEQ ID NO: 3372 - protein, 15 aa, synthetic construct
  REGION 1..15: note = Description of sequence: CDR3 from Table 9
CAMRELYTGGFKTIF

SEQ ID NO: 3373 - protein, 11 aa, synthetic construct
  REGION 1..11: note = Description of sequence: CDR3 from Table 9
CGMDSSYKLIF

SEQ ID NO: 3374 - protein, 13 aa, synthetic construct
  REGION 1..13: note = Description of sequence: CDR3 from Table 9
CAVWVGFGNVLHC

SEQ ID NO: 3375 - protein, 12 aa, synthetic construct
  REGION 1..12: note = Description of sequence: CDR3 from Table 9
CAGGDSWGKLQF

SEQ ID NO: 3376 - protein, 13 aa, synthetic construct
  REGION 1..13: note = Description of sequence: CDR3 from Table 9
CAVSGDAGNMLTF

SEQ ID NO: 3377 - protein, 11 aa, synthetic construct
  REGION 1..11: note = Description of sequence: CDR3 from Table 9
CAESMGNDMRF

SEQ ID NO: 3378 - protein, 10 aa, synthetic construct
  REGION 1..10: note = Description of sequence: CDR3 from Table 9
CAVNNARLMF

SEQ ID NO: 3379 - protein, 11 aa, synthetic construct
  REGION 1..11: note = Description of sequence: CDR3 from Table 9
CAGRGYSTLTF

SEQ ID NO: 3380 - protein, 13 aa, synthetic construct
  REGION 1..13: note = Description of sequence: CDR3 from Table 9
CAVTARSSYKLIF

SEQ ID NO: 3381 - protein, 12 aa, synthetic construct
  REGION 1..12: note = Description of sequence: CDR3 from Table 9
CAVGDSNYQLIW

SEQ ID NO: 3382 - protein, 13 aa, synthetic construct
  REGION 1..13: note = Description of sequence: CDR3 from Table 9
CAYRSFNNNDMRF

SEQ ID NO: 3383 - protein, 9 aa, synthetic construct
  REGION 1..9: note = Description of sequence: CDR3 from Table 9
CATDNDMRF

SEQ ID NO: 3384 - protein, 9 aa, synthetic construct
  REGION 1..9: note = Description of sequence: CDR3 from Table 9
CAPSLDMRF

SEQ ID NO: 3385 - protein, 17 aa, synthetic construct
  REGION 1..17: note = Description of sequence: CDR3 from Table 9
CLVGDGGVTGGGNKLTF

SEQ ID NO: 3386 - protein, 13 aa, synthetic construct
  REGION 1..13: note = Description of sequence: CDR3 from Table 9
CAESMERGDKLIF

SEQ ID NO: 3387 - protein, 12 aa, synthetic construct
  REGION 1..12: note = Description of sequence: CDR3 from Table 9
CAVVDSNYQLIW

SEQ ID NO: 3388 - protein, 16 aa, synthetic construct
  REGION 1..16: note = Description of sequence: CDR3 from Table 9
CAVYGDYGGSQGNLIF

SEQ ID NO: 3389 - protein, 15 aa, synthetic construct
  REGION 1..15: note = Description of sequence: CDR3 from Table 9
CALSEAEEYGNKLVF

SEQ ID NO: 3390 - protein, 13 aa, synthetic construct
  REGION 1..13: note = Description of sequence: CDR3 from Table 9
CAVKNTGRRALTF

SEQ ID NO: 3391 - protein, 13 aa, synthetic construct
  REGION 1..13: note = Description of sequence: CDR3 from Table 9
CAVQAFGNEKLTF

SEQ ID NO: 3392 - protein, 16 aa, synthetic construct
  REGION 1..16: note = Description of sequence: CDR3 from Table 9
CATGGVSNTNAGKSTF

SEQ ID NO: 3393 - protein, 15 aa, synthetic construct
  REGION 1..15: note = Description of sequence: CDR3 from Table 9
CALILTNFGNEKLTF

SEQ ID NO: 3394 - protein, 11 aa, synthetic construct
  REGION 1..11: note = Description of sequence: CDR3 from Table 9
CAASVGDMLTF

SEQ ID NO: 3395 - protein, 13 aa, synthetic construct
  REGION 1..13: note = Description of sequence: CDR3 from Table 9
CAVRDNNFNKFYF

SEQ ID NO: 3396 - protein, 12 aa, synthetic construct
  REGION 1..12: note = Description of sequence: CDR3 from Table 9
CAYMDSNYQLIW

SEQ ID NO: 3397 - protein, 11 aa, synthetic construct
  REGION 1..11: note = Description of sequence: CDR3 from Table 9
CAYNQGGKLIF

SEQ ID NO: 3398 - protein, 14 aa, synthetic construct
  REGION 1..14: note = Description of sequence: CDR3 from Table 9
CLVGYSGGYQKVTF

SEQ ID NO: 3399 - protein, 15 aa, synthetic construct
  REGION 1..15: note = Description of sequence: CDR3 from Table 9
CAVVYSGGGADGLTF

SEQ ID NO: 3400 - protein, 14 aa, synthetic construct
  REGION 1..14: note = Description of sequence: CDR3 from Table 9
CALTKETSGSRLTF

SEQ ID NO: 3401 - protein, 11 aa, synthetic construct
  REGION 1..11: note = Description of sequence: CDR3 from Table 9
CAVLNDYKLSF

SEQ ID NO: 3402 - protein, 12 aa, synthetic construct
  REGION 1..12: note = Description of sequence: CDR3 from Table 9
CLVGDPVDKIIF

SEQ ID NO: 3403 - protein, 15 aa, synthetic construct
  REGION 1..15: note = Description of sequence: CDR3 from Table 9
CATDEGGSTLGRLYF

SEQ ID NO: 3404 - protein, 14 aa, synthetic construct
  REGION 1..14: note = Description of sequence: CDR3 from Table 9
CVVTISGGYNKLIF

SEQ ID NO: 3405 - protein, 11 aa, synthetic construct
  REGION 1..11: note = Description of sequence: CDR3 from Table 9
CASGGGNMLTF

SEQ ID NO: 3406 - protein, 10 aa, synthetic construct
  REGION 1..10: note = Description of sequence: CDR3 from Table 9
CAGNNARLMF

SEQ ID NO: 3407 - protein, 15 aa, synthetic construct
  REGION 1..15: note = Description of sequence: CDR3 from Table 9
CALIYFSGGYNKLIF

SEQ ID NO: 3408 - protein, 12 aa, synthetic construct
  REGION 1..12: note = Description of sequence: CDR3 from Table 9
CICEGGSYIPTF

SEQ ID NO: 3409 - protein, 13 aa, synthetic construct
  REGION 1..13: note = Description of sequence: CDR3 from Table 9
CAVITGGGNKLTF

SEQ ID NO: 3410 - protein, 10 aa, synthetic construct
  REGION 1..10: note = Description of sequence: CDR3 from Table 9
CAMSGHDMRF

SEQ ID NO: 3411 - protein, 13 aa, synthetic construct
  REGION 1..13: note = Description of sequence: CDR3 from Table 9
CAVVRGDTDKLIF

SEQ ID NO: 3412 - protein, 13 aa, synthetic construct
  REGION 1..13: note = Description of sequence: CDR3 from Table 9
CAEETGGGNKLTF

SEQ ID NO: 3413 - protein, 13 aa, synthetic construct
  REGION 1..13: note = Description of sequence: CDR3 from Table 9
CAFIRGSQGNLIF

SEQ ID NO: 3414 - protein, 13 aa, synthetic construct
  REGION 1..13: note = Description of sequence: CDR3 from Table 9
CILSYNTGNQFYF

SEQ ID NO: 3415 - protein, 13 aa, synthetic construct
  REGION 1..13: note = Description of sequence: CDR3 from Table 9
CAPRGSGRRALTF

SEQ ID NO: 3416 - protein, 15 aa, synthetic construct
  REGION 1..15: note = Description of sequence: CDR3 from Table 9
CAGPHLSYNTDKLIF

SEQ ID NO: 3417 - protein, 12 aa, synthetic construct
  REGION 1..12: note = Description of sequence: CDR3 from Table 9
CAVGAGNNDMRF

SEQ ID NO: 3418 - protein, 16 aa, synthetic construct
  REGION 1..16: note = Description of sequence: CDR3 from Table 9
CAVPSRPNFGNEKLTF

SEQ ID NO: 3419 - protein, 14 aa, synthetic construct
  REGION 1..14: note = Description of sequence: CDR3 from Table 9
CALPDIQGAQKLVF

SEQ ID NO: 3420 - protein, 16 aa, synthetic construct
  REGION 1..16: note = Description of sequence: CDR3 from Table 9
CAMREDYGGSQGNLIF

SEQ ID NO: 3421 - protein, 13 aa, synthetic construct
  REGION 1..13: note = Description of sequence: CDR3 from Table 9
CIVRVGYNARLMF

SEQ ID NO: 3422 - protein, 13 aa, synthetic construct
  REGION 1..13: note = Description of sequence: CDR3 from Table 9
CGAVFLNDYKLSF

SEQ ID NO: 3423 - protein, 15 aa, synthetic construct
  REGION 1..15: note = Description of sequence: CDR3 from Table 9
CAVDIATFGNEKLTF

SEQ ID NO: 3424 - protein, 14 aa, synthetic construct
  REGION 1..14: note = Description of sequence: CDR3 from Table 9
STSFGSNYGQNFVF

SEQ ID NO: 3425 - protein, 12 aa, synthetic construct
  REGION 1..12: note = Description of sequence: CDR3 from Table 9
CVVLGGYNKLIF

SEQ ID NO: 3426 - protein, 13 aa, synthetic construct
  REGION 1..13: note = Description of sequence: CDR3 from Table 9
CALSEAGDYKLSF

SEQ ID NO: 3427 - protein, 12 aa, synthetic construct
  REGION 1..12: note = Description of sequence: CDR3 from Table 9
CAVYDNFNKFYF

SEQ ID NO: 3428 - protein, 15 aa, synthetic construct
  REGION 1..15: note = Description of sequence: CDR3 from Table 9
CALMMTTDSWGKLQF

SEQ ID NO: 3429 - protein, 13 aa, synthetic construct
  REGION 1..13: note = Description of sequence: CDR3 from Table 9
CACTGGGADGLTF

SEQ ID NO: 3430 - protein, 15 aa, synthetic construct
  REGION 1..15: note = Description of sequence: CDR3 from Table 9
CALNTIRDSNYQLIW

SEQ ID NO: 3431 - protein, 11 aa, synthetic construct
  REGION 1..11: note = Description of sequence: CDR3 from Table 9
CAVSEYDKIIF

SEQ ID NO: 3432 - protein, 13 aa, synthetic construct
  REGION 1..13: note = Description of sequence: CDR3 from Table 9
CAEIISSASKIIF

SEQ ID NO: 3433 - protein, 12 aa, synthetic construct
  REGION 1..12: note = Description of sequence: CDR3 from Table 9
CARLTGANNLFF

SEQ ID NO: 3434 - protein, 14 aa, synthetic construct
  REGION 1..14: note = Description of sequence: CDR3 from Table 9
CAVSPFSDGQKLLF

SEQ ID NO: 3435 - protein, 14 aa, synthetic construct
  REGION 1..14: note = Description of sequence: CDR3 from Table 9
CILRDMEYGNKLVF

SEQ ID NO: 3436 - protein, 10 aa, synthetic construct
  REGION 1..10: note = Description of sequence: CDR3 from Table 9
CAFNDYKLSF

SEQ ID NO: 3437 - protein, 17 aa, synthetic construct
  REGION 1..17: note = Description of sequence: CDR3 from Table 9
CAASRLPGYSSASKIIF

SEQ ID NO: 3438 - protein, 10 aa, synthetic construct
  REGION 1..10: note = Description of sequence: CDR3 from Table 9
CAMKDNDMRF

SEQ ID NO: 3439 - protein, 13 aa, synthetic construct
  REGION 1..13: note = Description of sequence: CDR3 from Table 9
CAVNSNSGYALNF

SEQ ID NO: 3440 - protein, 12 aa, synthetic construct
  REGION 1..12: note = Description of sequence: CDR3 from Table 9
CASSGGSYIPTF

SEQ ID NO: 3441 - protein, 10 aa, synthetic construct
  REGION 1..10: note = Description of sequence: CDR3 from Table 9
CAVNDYKLSF

SEQ ID NO: 3442 - protein, 15 aa, synthetic construct
  REGION 1..15: note = Description of sequence: CDR3 from Table 9
CAMREHGTAGNKLTF

SEQ ID NO: 3443 - protein, 14 aa, synthetic construct
  REGION 1..14: note = Description of sequence: CDR3 from Table 9
CAMRERTGGFKTIF

SEQ ID NO: 3444 - protein, 14 aa, synthetic construct
  REGION 1..14: note = Description of sequence: CDR3 from Table 9
CAVMTTDSWGKLQF

SEQ ID NO: 3445 - protein, 16 aa, synthetic construct
  REGION 1..16: note = Description of sequence: CDR3 from Table 9
CAMRETPQGGSEKLVF

SEQ ID NO: 3446 - protein, 11 aa, synthetic construct
  REGION 1..11: note = Description of sequence: CDR3 from Table 9
CAFINDYKLSF

SEQ ID NO: 3447 - protein, 13 aa, synthetic construct
  REGION 1..13: note = Description of sequence: CDR3 from Table 9
CAVSDTGGFKTIF

SEQ ID NO: 3448 - protein, 15 aa, synthetic construct
  REGION 1..15: note = Description of sequence: CDR3 from Table 9
CVVNMEGGGADGLTF

SEQ ID NO: 3449 - protein, 10 aa, synthetic construct
  REGION 1..10: note = Description of sequence: CDR3 from Table 9
CALSEDQFYF

SEQ ID NO: 3450 - protein, 14 aa, synthetic construct
  REGION 1..14: note = Description of sequence: CDR3 from Table 9
CAVRSGAGSYQLTF

SEQ ID NO: 3451 - protein, 14 aa, synthetic construct
  REGION 1..14: note = Description of sequence: CDR3 from Table 9
CASHGSSNTGKLIF

SEQ ID NO: 3452 - protein, 11 aa, synthetic construct
  REGION 1..11: note = Description of sequence: CDR3 from Table 9
CAGDSWGKLQF

SEQ ID NO: 3453 - protein, 12 aa, synthetic construct
  REGION 1..12: note = Description of sequence: CDR3 from Table 9
CARPPDDYKLSF

SEQ ID NO: 3454 - protein, 15 aa, synthetic construct
  REGION 1..15: note = Description of sequence: CDR3 from Table 9
CAFMKQSYRDDKIIF

SEQ ID NO: 3455 - protein, 8 aa, synthetic construct
  REGION 1..8: note = Description of sequence: CDR3 from Table 9
VLFRMLTF

SEQ ID NO: 3456 - protein, 10 aa, synthetic construct
  REGION 1..10: note = Description of sequence: CDR3 from Table 9
CAGFGNVLHC

SEQ ID NO: 3457 - protein, 15 aa, synthetic construct
  REGION 1..15: note = Description of sequence: CDR3 from Table 9
CALTASNQAGTALIF

SEQ ID NO: 3458 - protein, 14 aa, synthetic construct
  REGION 1..14: note = Description of sequence: CDR3 from Table 9
CAVTVVDNNARLMF

SEQ ID NO: 3459 - protein, 12 aa, synthetic construct
  REGION 1..12: note = Description of sequence: CDR3 from Table 9
CAVTPNFNKFYF

SEQ ID NO: 3460 - protein, 17 aa, synthetic construct
  REGION 1..17: note = Description of sequence: CDR3 from Table 9
CLVGDLTSFQGAQKLVF

SEQ ID NO: 3461 - protein, 16 aa, synthetic construct
  REGION 1..16: note = Description of sequence: CDR3 from Table 9
CALSMYSGGGADGLTF

SEQ ID NO: 3462 - protein, 11 aa, synthetic construct
  REGION 1..11: note = Description of sequence: CDR3 from Table 9
CAVRDYYQLIW

SEQ ID NO: 3463 - protein, 10 aa, synthetic construct
  REGION 1..10: note = Description of sequence: CDR3 from Table 9
CAVRGGKLTF

SEQ ID NO: 3464 - protein, 14 aa, synthetic construct
  REGION 1..14: note = Description of sequence: CDR3 from Table 9
CAVGEETSGSRLTF

SEQ ID NO: 3465 - protein, 13 aa, synthetic construct
  REGION 1..13: note = Description of sequence: CDR3 from Table 9
CAGADTNAGKSTF

SEQ ID NO: 3466 - protein, 15 aa, synthetic construct
  REGION 1..15: note = Description of sequence: CDR3 from Table 9
CAMREPYNAGNMLTF

SEQ ID NO: 3467 - protein, 13 aa, synthetic construct
  REGION 1..13: note = Description of sequence: CDR3 from Table 9
CAIPPSGTYKYIF

SEQ ID NO: 3468 - protein, 13 aa, synthetic construct
  REGION 1..13: note = Description of sequence: CDR3 from Table 9
CAVIDPARARLMF

SEQ ID NO: 3469 - protein, 12 aa, synthetic construct
  REGION 1..12: note = Description of sequence: CDR3 from Table 9
CAVGRYDYKLSF

SEQ ID NO: 3470 - protein, 14 aa, synthetic construct
  REGION 1..14: note = Description of sequence: CDR3 from Table 9
CAVGSQGGSEKLVF

SEQ ID NO: 3471 - protein, 12 aa, synthetic construct
  REGION 1..12: note = Description of sequence: CDR3 from Table 9
CAAKWGNNDMRF

SEQ ID NO: 3472 - protein, 14 aa, synthetic construct
  REGION 1..14: note = Description of sequence: CDR3 from Table 9
CAVQGYSNDYKLSF

SEQ ID NO: 3473 - protein, 15 aa, synthetic construct
  REGION 1..15: note = Description of sequence: CDR3 from Table 9
CAVNTFTGGGNKLTF

SEQ ID NO: 3474 - protein, 15 aa, synthetic construct
  REGION 1..15: note = Description of sequence: CDR3 from Table 9
CAVKAGNFGNEKLTF

SEQ ID NO: 3475 - protein, 11 aa, synthetic construct
  REGION 1..11: note = Description of sequence: CDR3 from Table 9
CAVNSGYALNF

SEQ ID NO: 3476 - protein, 12 aa, synthetic construct
  REGION 1..12: note = Description of sequence: CDR3 from Table 9
CAVSPGNTPLVF

SEQ ID NO: 3477 - protein, 17 aa, synthetic construct
  REGION 1..17: note = Description of sequence: CDR3 from Table 9
CAYRSFSNAGNNRKLIW

SEQ ID NO: 3478 - protein, 11 aa, synthetic construct
  REGION 1..11: note = Description of sequence: CDR3 from Table 9
CATEGSYIPTF

SEQ ID NO: 3479 - protein, 18 aa, synthetic construct
  REGION 1..18: note = Description of sequence: CDR3 from Table 9
CAYRSPFLRAGTASKLTF

SEQ ID NO: 3480 - protein, 14 aa, synthetic construct
  REGION 1..14: note = Description of sequence: CDR3 from Table 9
CALSEGERDDKIIF

SEQ ID NO: 3481 - protein, 11 aa, synthetic construct
  REGION 1..11: note = Description of sequence: CDR3 from Table 9
CAAIIGQKLLF

SEQ ID NO: 3482 - protein, 16 aa, synthetic construct
  REGION 1..16: note = Description of sequence: CDR3 from Table 9
CILRGIPRDSSYKLIF

SEQ ID NO: 3483 - protein, 16 aa, synthetic construct
  REGION 1..16: note = Description of sequence: CDR3 from Table 9
CAMREGRVFGNEKLTF

SEQ ID NO: 3484 - protein, 14 aa, synthetic construct
  REGION 1..14: note = Description of sequence: CDR3 from Table 9
CALSRGGGADGLTF

SEQ ID NO: 3485 - protein, 10 aa, synthetic construct
  REGION 1..10: note = Description of sequence: CDR3 from Table 9
CAGYDYKLSF

SEQ ID NO: 3486 - protein, 12 aa, synthetic construct
  REGION 1..12: note = Description of sequence: CDR3 from Table 9
CAGGTGYNKLIF

SEQ ID NO: 3487 - protein, 13 aa, synthetic construct
  REGION 1..13: note = Description of sequence: CDR3 from Table 9
CAIIRFGNEKLTF

SEQ ID NO: 3488 - protein, 15 aa, synthetic construct
  REGION 1..15: note = Description of sequence: CDR3 from Table 9
CLLLNYGGSQGNLIF

SEQ ID NO: 3489 - protein, 16 aa, synthetic construct
  REGION 1..16: note = Description of sequence: CDR3 from Table 9
CAVSVGVKYNFNKFYF

SEQ ID NO: 3490 - protein, 15 aa, synthetic construct
  REGION 1..15: note = Description of sequence: CDR3 from Table 9
CASSFLGTGLNEQYF

SEQ ID NO: 3491 - protein, 12 aa, synthetic construct
  REGION 1..12: note = Description of sequence: CDR3 from Table 9
CASSYSWGEQFF

SEQ ID NO: 3492 - protein, 14 aa, synthetic construct
  REGION 1..14: note = Description of sequence: CDR3 from Table 9
CASTHWERVDEQFF

SEQ ID NO: 3493 - protein, 13 aa, synthetic construct
  REGION 1..13: note = Description of sequence: CDR3 from Table 9
CASSYGVNTEAFF

SEQ ID NO: 3494 - protein, 12 aa, synthetic construct
  REGION 1..12: note = Description of sequence: CDR3 from Table 9
CAISRGDTEAFF

SEQ ID NO: 3495 - protein, 15 aa, synthetic construct
  REGION 1..15: note = Description of sequence: CDR3 from Table 9
CATSAKTRLNTEAFF

SEQ ID NO: 3496 - protein, 15 aa, synthetic construct
  REGION 1..15: note = Description of sequence: CDR3 from Table 9
CASSKGQGANYGYTF

SEQ ID NO: 3497 - protein, 14 aa, synthetic construct
  REGION 1..14: note = Description of sequence: CDR3 from Table 9
CASSLIDSPYEQYF

SEQ ID NO: 3498 - protein, 13 aa, synthetic construct
  REGION 1..13: note = Description of sequence: CDR3 from Table 9
CASSLGPNSPLHF

SEQ ID NO: 3499 - protein, 10 aa, synthetic construct
  REGION 1..10: note = Description of sequence: CDR3 from Table 9
CASGSYEQYF

SEQ ID NO: 3500 - protein, 17 aa, synthetic construct
  REGION 1..17: note = Description of sequence: CDR3 from Table 9
CASSSQTGPYSNQPQHF

SEQ ID NO: 3501 - protein, 15 aa, synthetic construct
  REGION 1..15: note = Description of sequence: CDR3 from Table 9
CASRDSVGGGEGYTF

SEQ ID NO: 3502 - protein, 14 aa, synthetic construct
  REGION 1..14: note = Description of sequence: CDR3 from Table 9
CASSVTGRWVPLHF

SEQ ID NO: 3503 - protein, 19 aa, synthetic construct
  REGION 1..19: note = Description of sequence: CDR3 from Table 9
CASSQNGSEAAYSNQPQHF

SEQ ID NO: 3504 - protein, 12 aa, synthetic construct
  REGION 1..12: note = Description of sequence: CDR3 from Table 9
CSATGQNYEQYF

SEQ ID NO: 3505 - protein, 18 aa, synthetic construct
  REGION 1..18: note = Description of sequence: CDR3 from Table 9
CASSIGTVNRGPNTEAFF

SEQ ID NO: 3506 - protein, 13 aa, synthetic construct
  REGION 1..13: note = Description of sequence: CDR3 from Table 9
CASSWQGSNIQYF

SEQ ID NO: 3507 - protein, 14 aa, synthetic construct
  REGION 1..14: note = Description of sequence: CDR3 from Table 9
CASSPITNTGELFF

SEQ ID NO: 3508 - protein, 13 aa, synthetic construct
  REGION 1..13: note = Description of sequence: CDR3 from Table 9
CSATLDRNYGYTF

SEQ ID NO: 3509 - protein, 15 aa, synthetic construct
  REGION 1..15: note = Description of sequence: CDR3 from Table 9
CASSLETGGWETQYF

SEQ ID NO: 3510 - protein, 13 aa, synthetic construct
  REGION 1..13: note = Description of sequence: CDR3 from Table 9
CASSLNMNTEAFF

SEQ ID NO: 3511 - protein, 15 aa, synthetic construct
  REGION 1..15: note = Description of sequence: CDR3 from Table 9
CASSIDRTVGNTIYF

SEQ ID NO: 3512 - protein, 12 aa, synthetic construct
  REGION 1..12: note = Description of sequence: CDR3 from Table 9
CSARDWGYEQYF

SEQ ID NO: 3513 - protein, 13 aa, synthetic construct
  REGION 1..13: note = Description of sequence: CDR3 from Table 9
CASSFGSGGALYF

SEQ ID NO: 3514 - protein, 13 aa, synthetic construct
  REGION 1..13: note = Description of sequence: CDR3 from Table 9
CASSFLLYNEQFF

SEQ ID NO: 3515 - protein, 15 aa, synthetic construct
  REGION 1..15: note = Description of sequence: CDR3 from Table 9
CASSEMDGSNQPQHF

SEQ ID NO: 3516 - protein, 13 aa, synthetic construct
  REGION 1..13: note = Description of sequence: CDR3 from Table 9
CSVRLTDYNEQFF

SEQ ID NO: 3517 - protein, 15 aa, synthetic construct
  REGION 1..15: note = Description of sequence: CDR3 from Table 9
CASSGSGASTDTQYF

SEQ ID NO: 3518 - protein, 14 aa, synthetic construct
  REGION 1..14: note = Description of sequence: CDR3 from Table 9
CASSLGPGGASYTF

SEQ ID NO: 3519 - protein, 15 aa, synthetic construct
  REGION 1..15: note = Description of sequence: CDR3 from Table 9
CASSETSLFTHGYTF

SEQ ID NO: 3520 - protein, 13 aa, synthetic construct
  REGION 1..13: note = Description of sequence: CDR3 from Table 9
CAWSSSVNTEAFF

SEQ ID NO: 3521 - protein, 13 aa, synthetic construct
  REGION 1..13: note = Description of sequence: CDR3 from Table 9
CASSPMTGAEQFF

SEQ ID NO: 3522 - protein, 15 aa, synthetic construct
  REGION 1..15: note = Description of sequence: CDR3 from Table 9
CASSLGGLVYNEQFF

SEQ ID NO: 3523 - protein, 13 aa, synthetic construct
  REGION 1..13: note = Description of sequence: CDR3 from Table 9
CASSFSGGNEQFF

SEQ ID NO: 3524 - protein, 13 aa, synthetic construct
  REGION 1..13: note = Description of sequence: CDR3 from Table 9
CASTSGAYNEQFF

SEQ ID NO: 3525 - protein, 17 aa, synthetic construct
  REGION 1..17: note = Description of sequence: CDR3 from Table 9
CASSYQTGPYSNQPQHF

SEQ ID NO: 3526 - protein, 14 aa, synthetic construct
  REGION 1..14: note = Description of sequence: CDR3 from Table 9
CASSWVGGADTQYF

SEQ ID NO: 3527 - protein, 15 aa, synthetic construct
  REGION 1..15: note = Description of sequence: CDR3 from Table 9
CASSQDLGTGNTIYF

SEQ ID NO: 3528 - protein, 13 aa, synthetic construct
  REGION 1..13: note = Description of sequence: CDR3 from Table 9
CSASDSLTISGFF

SEQ ID NO: 3529 - protein, 15 aa, synthetic construct
  REGION 1..15: note = Description of sequence: CDR3 from Table 9
CASSLLGQTNYGYTF

SEQ ID NO: 3530 - protein, 15 aa, synthetic construct
  REGION 1..15: note = Description of sequence: CDR3 from Table 9
CASSEGQGRWYEQYF

SEQ ID NO: 3531 - protein, 12 aa, synthetic construct
  REGION 1..12: note = Description of sequence: CDR3 from Table 9
CASSVGSTEAFF

SEQ ID NO: 3532 - protein, 14 aa, synthetic construct
  REGION 1..14: note = Description of sequence: CDR3 from Table 9
CASSPWEMNTEAFF

SEQ ID NO: 3533 - protein, 15 aa, synthetic construct
  REGION 1..15: note = Description of sequence: CDR3 from Table 9
CSASVSGGPLDTQYF

SEQ ID NO: 3534 - protein, 15 aa, synthetic construct
  REGION 1..15: note = Description of sequence: CDR3 from Table 9
CASSLGPMEENIQYF

SEQ ID NO: 3535 - protein, 12 aa, synthetic construct
  REGION 1..12: note = Description of sequence: CDR3 from Table 9
CASSSDRGEQFF

SEQ ID NO: 3536 - protein, 14 aa, synthetic construct
  REGION 1..14: note = Description of sequence: CDR3 from Table 9
CASSEVEGPGELFF

SEQ ID NO: 3537 - protein, 14 aa, synthetic construct
  REGION 1..14: note = Description of sequence: CDR3 from Table 9
CASSLSGFGNTIYF

SEQ ID NO: 3538 - protein, 20 aa, synthetic construct
  REGION 1..20: note = Description of sequence: CDR3 from Table 9
CASSQGGQDGHGTTNEKLFF

SEQ ID NO: 3539 - protein, 16 aa, synthetic construct
  REGION 1..16: note = Description of sequence: CDR3 from Table 9
CASSLGGGGPQETQYF

SEQ ID NO: 3540 - protein, 14 aa, synthetic construct
  REGION 1..14: note = Description of sequence: CDR3 from Table 9
CATSRTDISYEQYF

SEQ ID NO: 3541 - protein, 14 aa, synthetic construct
  REGION 1..14: note = Description of sequence: CDR3 from Table 9
CASSYYGTTDEQYF

SEQ ID NO: 3542 - protein, 14 aa, synthetic construct
  REGION 1..14: note = Description of sequence: CDR3 from Table 9
CASSLGPSLYEQYF

SEQ ID NO: 3543 - protein, 15 aa, synthetic construct
  REGION 1..15: note = Description of sequence: CDR3 from Table 9
CASSWGSSPAETQYF

SEQ ID NO: 3544 - protein, 16 aa, synthetic construct
  REGION 1..16: note = Description of sequence: CDR3 from Table 9
CASSDQGALSSYEQYF

SEQ ID NO: 3545 - protein, 15 aa, synthetic construct
  REGION 1..15: note = Description of sequence: CDR3 from Table 9
CASSRIANNNNEQFF

SEQ ID NO: 3546 - protein, 15 aa, synthetic construct
  REGION 1..15: note = Description of sequence: CDR3 from Table 9
CSVPVFGRGTGELFF

SEQ ID NO: 3547 - protein, 14 aa, synthetic construct
  REGION 1..14: note = Description of sequence: CDR3 from Table 9
CASSLWGTYNEQFF

SEQ ID NO: 3548 - protein, 13 aa, synthetic construct
  REGION 1..13: note = Description of sequence: CDR3 from Table 9
CASSQADHYEQYF

SEQ ID NO: 3549 - protein, 11 aa, synthetic construct
  REGION 1..11: note = Description of sequence: CDR3 from Table 9
CASSLFNEQFF

SEQ ID NO: 3550 - protein, 13 aa, synthetic construct
  REGION 1..13: note = Description of sequence: CDR3 from Table 9
CASSFGGASEAFF

SEQ ID NO: 3551 - protein, 12 aa, synthetic construct
  REGION 1..12: note = Description of sequence: CDR3 from Table 9
CASSVGNTEAFF

SEQ ID NO: 3552 - protein, 13 aa, synthetic construct
  REGION 1..13: note = Description of sequence: CDR3 from Table 9
CASSPILTYEQYF

SEQ ID NO: 3553 - protein, 14 aa, synthetic construct
  REGION 1..14: note = Description of sequence: CDR3 from Table 9
CASSMAGSSYEQYF

SEQ ID NO: 3554 - protein, 14 aa, synthetic construct
  REGION 1..14: note = Description of sequence: CDR3 from Table 9
CASSLAQSDSLAFF

SEQ ID NO: 3555 - protein, 14 aa, synthetic construct
  REGION 1..14: note = Description of sequence: CDR3 from Table 9
CASSLQGSDNEQFF

SEQ ID NO: 3556 - protein, 14 aa, synthetic construct
  REGION 1..14: note = Description of sequence: CDR3 from Table 9
CSARDLTVAETQYF

SEQ ID NO: 3557 - protein, 12 aa, synthetic construct
  REGION 1..12: note = Description of sequence: CDR3 from Table 9
CASSSGGAWYTF

SEQ ID NO: 3558 - protein, 14 aa, synthetic construct
  REGION 1..14: note = Description of sequence: CDR3 from Table 9
CASSPRGVGTEAFF

SEQ ID NO: 3559 - protein, 16 aa, synthetic construct
  REGION 1..16: note = Description of sequence: CDR3 from Table 9
CASSPSSGGITDTQYF

SEQ ID NO: 3560 - protein, 17 aa, synthetic construct
  REGION 1..17: note = Description of sequence: CDR3 from Table 9
CASSEQGGERRNTEAFF

SEQ ID NO: 3561 - protein, 14 aa, synthetic construct
  REGION 1..14: note = Description of sequence: CDR3 from Table 9
CASSQGWGVETQYF

SEQ ID NO: 3562 - protein, 15 aa, synthetic construct
  REGION 1..15: note = Description of sequence: CDR3 from Table 9
CASSYSTGGTDTQYF

SEQ ID NO: 3563 - protein, 16 aa, synthetic construct
  REGION 1..16: note = Description of sequence: CDR3 from Table 9
CASSRTQGYSNQPQHF

SEQ ID NO: 3564 - protein, 15 aa, synthetic construct
  REGION 1..15: note = Description of sequence: CDR3 from Table 9
CASSIFTRRGYEQYF

SEQ ID NO: 3565 - protein, 15 aa, synthetic construct
  REGION 1..15: note = Description of sequence: CDR3 from Table 9
CASSGRQGIDTEAFF

SEQ ID NO: 3566 - protein, 16 aa, synthetic construct
  REGION 1..16: note = Description of sequence: CDR3 from Table 9
CAWIDFLGQMNTEAFF

SEQ ID NO: 3567 - protein, 14 aa, synthetic construct
  REGION 1..14: note = Description of sequence: CDR3 from Table 9
CATSGTGGTGELFF

SEQ ID NO: 3568 - protein, 11 aa, synthetic construct
  REGION 1..11: note = Description of sequence: CDR3 from Table 9
CASSLSYEQYF

SEQ ID NO: 3569 - protein, 13 aa, synthetic construct
  REGION 1..13: note = Description of sequence: CDR3 from Table 9
CASSFGPGYEQYF

SEQ ID NO: 3570 - protein, 15 aa, synthetic construct
  REGION 1..15: note = Description of sequence: CDR3 from Table 9
CASSYARDRNTEAFF

SEQ ID NO: 3571 - protein, 13 aa, synthetic construct
  REGION 1..13: note = Description of sequence: CDR3 from Table 9
CAGWDRTPYEQYF

SEQ ID NO: 3572 - protein, 14 aa, synthetic construct
  REGION 1..14: note = Description of sequence: CDR3 from Table 9
CASSEDAGNYGYTF

SEQ ID NO: 3573 - protein, 15 aa, synthetic construct
  REGION 1..15: note = Description of sequence: CDR3 from Table 9
CASSEIQAFEETQYF

SEQ ID NO: 3574 - protein, 17 aa, synthetic construct
  REGION 1..17: note = Description of sequence: CDR3 from Table 9
CASSLFARGGPTDTQYF

SEQ ID NO: 3575 - protein, 13 aa, synthetic construct
  REGION 1..13: note = Description of sequence: CDR3 from Table 9
CASSFGSGNTIYF

SEQ ID NO: 3576 - protein, 17 aa, synthetic construct
  REGION 1..17: note = Description of sequence: CDR3 from Table 9
CASSPHSGGDPRNEQFF

SEQ ID NO: 3577 - protein, 14 aa, synthetic construct
  REGION 1..14: note = Description of sequence: CDR3 from Table 9
CASSVGGGHQPQHF

SEQ ID NO: 3578 - protein, 12 aa, synthetic construct
  REGION 1..12: note = Description of sequence: CDR3 from Table 9
CANGQGDYEQYF

SEQ ID NO: 3579 - protein, 16 aa, synthetic construct
  REGION 1..16: note = Description of sequence: CDR3 from Table 9
CASSETSGLIDEKLFF

SEQ ID NO: 3580 - protein, 14 aa, synthetic construct
  REGION 1..14: note = Description of sequence: CDR3 from Table 9
CASSLAYRPYEQYF

SEQ ID NO: 3581 - protein, 15 aa, synthetic construct
  REGION 1..15: note = Description of sequence: CDR3 from Table 9
CASSWTGDSNQPQHF

SEQ ID NO: 3582 - protein, 15 aa, synthetic construct
  REGION 1..15: note = Description of sequence: CDR3 from Table 9
CASSPPDQVYNEQFF

SEQ ID NO: 3583 - protein, 15 aa, synthetic construct
  REGION 1..15: note = Description of sequence: CDR3 from Table 9
CASSSNIWSPDTQYF

SEQ ID NO: 3584 - protein, 14 aa, synthetic construct
  REGION 1..14: note = Description of sequence: CDR3 from Table 9
CASSPWDSSGELFF

SEQ ID NO: 3585 - protein, 16 aa, synthetic construct
  REGION 1..16: note = Description of sequence: CDR3 from Table 9
CASSYYSGQGNEKLFF

SEQ ID NO: 3586 - protein, 13 aa, synthetic construct
  REGION 1..13: note = Description of sequence: CDR3 from Table 9
CASSLGGHQPQHF

SEQ ID NO: 3587 - protein, 13 aa, synthetic construct
  REGION 1..13: note = Description of sequence: CDR3 from Table 9
CASTESSYNEQFF

SEQ ID NO: 3588 - protein, 13 aa, synthetic construct
  REGION 1..13: note = Description of sequence: CDR3 from Table 9
CASSVQSTDTQYF

SEQ ID NO: 3589 - protein, 20 aa, synthetic construct
  REGION 1..20: note = Description of sequence: CDR3 from Table 9
CASSSTVGVRDYHSGNTIYF

SEQ ID NO: 3590 - protein, 12 aa, synthetic construct
  REGION 1..12: note = Description of sequence: CDR3 from Table 9
CASTDLSDTQYF

SEQ ID NO: 3591 - protein, 16 aa, synthetic construct
  REGION 1..16: note = Description of sequence: CDR3 from Table 9
CASSESGAAYTGELFF

SEQ ID NO: 3592 - protein, 14 aa, synthetic construct
  REGION 1..14: note = Description of sequence: CDR3 from Table 9
CATERGFRTDTQYF

SEQ ID NO: 3593 - protein, 14 aa, synthetic construct
  REGION 1..14: note = Description of sequence: CDR3 from Table 9
CASSYEQGPYEQYF

SEQ ID NO: 3594 - protein, 17 aa, synthetic construct
  REGION 1..17: note = Description of sequence: CDR3 from Table 9
CASSQAYGGDSSYEQYF

SEQ ID NO: 3595 - protein, 16 aa, synthetic construct
  REGION 1..16: note = Description of sequence: CDR3 from Table 9
CASGRSGGVGRNGYTF

SEQ ID NO: 3596 - protein, 15 aa, synthetic construct
  REGION 1..15: note = Description of sequence: CDR3 from Table 9
CASALGSGGAYEQFF

SEQ ID NO: 3597 - protein, 14 aa, synthetic construct
  REGION 1..14: note = Description of sequence: CDR3 from Table 9
CASTLGQGNTEAFF

SEQ ID NO: 3598 - protein, 15 aa, synthetic construct
  REGION 1..15: note = Description of sequence: CDR3 from Table 9
CASSQDTGSGNTIYF

SEQ ID NO: 3599 - protein, 16 aa, synthetic construct
  REGION 1..16: note = Description of sequence: CDR3 from Table 9
CASSQGPGTGFEGYTF

SEQ ID NO: 3600 - protein, 13 aa, synthetic construct
  REGION 1..13: note = Description of sequence: CDR3 from Table 9
CASRRGPTDTQYF

SEQ ID NO: 3601 - protein, 15 aa, synthetic construct
  REGION 1..15: note = Description of sequence: CDR3 from Table 9
CASSALAGGYNEQFF

SEQ ID NO: 3602 - protein, 13 aa, synthetic construct
  REGION 1..13: note = Description of sequence: CDR3 from Table 9
CSAPKEEPYGYTF

SEQ ID NO: 3603 - protein, 13 aa, synthetic construct
  REGION 1..13: note = Description of sequence: CDR3 from Table 9
CASSLTGSAEAFF

SEQ ID NO: 3604 - protein, 12 aa, synthetic construct
  REGION 1..12: note = Description of sequence: CDR3 from Table 9
CSVERGGDEQFF

SEQ ID NO: 3605 - protein, 17 aa, synthetic construct
  REGION 1..17: note = Description of sequence: CDR3 from Table 9
CASSYSISGQGGETQYF

SEQ ID NO: 3606 - protein, 14 aa, synthetic construct
  REGION 1..14: note = Description of sequence: CDR3 from Table 9
CASSGRQGSYEQYF

SEQ ID NO: 3607 - protein, 20 aa, synthetic construct
  REGION 1..20: note = Description of sequence: CDR3 from Table 9
CSAPSYRELAGAYLQETQYF

SEQ ID NO: 3608 - protein, 13 aa, synthetic construct
  REGION 1..13: note = Description of sequence: CDR3 from Table 9
CSARTWTGNTIYF

SEQ ID NO: 3609 - protein, 17 aa, synthetic construct
  REGION 1..17: note = Description of sequence: CDR3 from Table 9
CASSLVAGPYSQETQYF

SEQ ID NO: 3610 - protein, 14 aa, synthetic construct
  REGION 1..14: note = Description of sequence: CDR3 from Table 9
CASSPRTGVGEQYF

SEQ ID NO: 3611 - protein, 16 aa, synthetic construct
  REGION 1..16: note = Description of sequence: CDR3 from Table 9
CASSFRQTLAVYEQYF

SEQ ID NO: 3612 - protein, 16 aa, synthetic construct
  REGION 1..16: note = Description of sequence: CDR3 from Table 9
CASSLGQEIPYYGYTF

SEQ ID NO: 3613 - protein, 15 aa, synthetic construct
  REGION 1..15: note = Description of sequence: CDR3 from Table 9
CASSSQGGAKNEQYF

SEQ ID NO: 3614 - protein, 16 aa, synthetic construct
  REGION 1..16: note = Description of sequence: CDR3 from Table 9
CASSLVGADRSGELFF

SEQ ID NO: 3615 - protein, 14 aa, synthetic construct
  REGION 1..14: note = Description of sequence: CDR3 from Table 9
CASSYGQPNTEAFF

SEQ ID NO: 3616 - protein, 13 aa, synthetic construct
  REGION 1..13: note = Description of sequence: CDR3 from Table 9
CSARTGNTNEQFF

SEQ ID NO: 3617 - protein, 16 aa, synthetic construct
  REGION 1..16: note = Description of sequence: CDR3 from Table 9
CASSQGTGGIVDIQYF

SEQ ID NO: 3618 - protein, 13 aa, synthetic construct
  REGION 1..13: note = Description of sequence: CDR3 from Table 9
CASRDILYNEQFF

SEQ ID NO: 3619 - protein, 15 aa, synthetic construct
  REGION 1..15: note = Description of sequence: CDR3 from Table 9
CASSSQSSGANVLTF

SEQ ID NO: 3620 - protein, 14 aa, synthetic construct
  REGION 1..14: note = Description of sequence: CDR3 from Table 9
CASSQMTGGGEQFF

SEQ ID NO: 3621 - protein, 11 aa, synthetic construct
  REGION 1..11: note = Description of sequence: CDR3 from Table 9
CASSPGGEAFF

SEQ ID NO: 3622 - protein, 16 aa, synthetic construct
  REGION 1..16: note = Description of sequence: CDR3 from Table 9
CASSLVRQEAAGELFF

SEQ ID NO: 3623 - protein, 15 aa, synthetic construct
  REGION 1..15: note = Description of sequence: CDR3 from Table 9
CASSGGQGWTDTQYF

SEQ ID NO: 3624 - protein, 13 aa, synthetic construct
  REGION 1..13: note = Description of sequence: CDR3 from Table 9
CASRPRQVETQYF

SEQ ID NO: 3625 - protein, 14 aa, synthetic construct
  REGION 1..14: note = Description of sequence: CDR3 from Table 9
CASGTLNSNQPQHF

SEQ ID NO: 3626 - protein, 12 aa, synthetic construct
  REGION 1..12: note = Description of sequence: CDR3 from Table 9
CASRRDSSGYTF

SEQ ID NO: 3627 - protein, 12 aa, synthetic construct
  REGION 1..12: note = Description of sequence: CDR3 from Table 9
CSVEQGGDTQYF

SEQ ID NO: 3628 - protein, 13 aa, synthetic construct
  REGION 1..13: note = Description of sequence: CDR3 from Table 9
CASSGFSNQPQHF

SEQ ID NO: 3629 - protein, 12 aa, synthetic construct
  REGION 1..12: note = Description of sequence: CDR3 from Table 9
CATLWGTDTQYF

SEQ ID NO: 3630 - protein, 14 aa, synthetic construct
  REGION 1..14: note = Description of sequence: CDR3 from Table 9
CASSYIPGRYEQYF

SEQ ID NO: 3631 - protein, 12 aa, synthetic construct
  REGION 1..12: note = Description of sequence: CDR3 from Table 9
CASSLEGEKLFF

SEQ ID NO: 3632 - protein, 15 aa, synthetic construct
  REGION 1..15: note = Description of sequence: CDR3 from Table 9
CASSEFRDRNQPQHF

SEQ ID NO: 3633 - protein, 18 aa, synthetic construct
  REGION 1..18: note = Description of sequence: CDR3 from Table 9
CASSQGRRGGGDKNIQYF

SEQ ID NO: 3634 - protein, 15 aa, synthetic construct
  REGION 1..15: note = Description of sequence: CDR3 from Table 9
CSARSEKSGANVLTF

SEQ ID NO: 3635 - protein, 13 aa, synthetic construct
  REGION 1..13: note = Description of sequence: CDR3 from Table 9
CASSSGGGQPQHF

SEQ ID NO: 3636 - protein, 13 aa, synthetic construct
  REGION 1..13: note = Description of sequence: CDR3 from Table 9
CASSSSSGDEQYF

SEQ ID NO: 3637 - protein, 16 aa, synthetic construct
  REGION 1..16: note = Description of sequence: CDR3 from Table 9
CAISELDWGVSSPLHF

SEQ ID NO: 3638 - protein, 12 aa, synthetic construct
  REGION 1..12: note = Description of sequence: CDR3 from Table 9
CATSPSLGTQYF

SEQ ID NO: 3639 - protein, 16 aa, synthetic construct
  REGION 1..16: note = Description of sequence: CDR3 from Table 9
CATSKTADRSPYEQYF

SEQ ID NO: 3640 - protein, 17 aa, synthetic construct
  REGION 1..17: note = Description of sequence: CDR3 from Table 9
CASSQEGRQGSYNEQFF

SEQ ID NO: 3641 - protein, 14 aa, synthetic construct
  REGION 1..14: note = Description of sequence: CDR3 from Table 9
CASRPGQVVYGYTF

SEQ ID NO: 3642 - protein, 18 aa, synthetic construct
  REGION 1..18: note = Description of sequence: CDR3 from Table 9
CASSLKTDSTPLQETQYF

SEQ ID NO: 3643 - protein, 15 aa, synthetic construct
  REGION 1..15: note = Description of sequence: CDR3 from Table 9
CASSQGTSGTDTQYF

SEQ ID NO: 3644 - protein, 13 aa, synthetic construct
  REGION 1..13: note = Description of sequence: CDR3 from Table 9
CAWSWTVNTEAFF

SEQ ID NO: 3645 - protein, 17 aa, synthetic construct
  REGION 1..17: note = Description of sequence: CDR3 from Table 9
CSVVGTGSVITNEKLFF

SEQ ID NO: 3646 - protein, 16 aa, synthetic construct
  REGION 1..16: note = Description of sequence: CDR3 from Table 9
CASSSDLRTNYNEQFF

SEQ ID NO: 3647 - protein, 13 aa, synthetic construct
  REGION 1..13: note = Description of sequence: CDR3 from Table 9
CASSQDEGYEQYF

SEQ ID NO: 3648 - protein, 12 aa, synthetic construct
  REGION 1..12: note = Description of sequence: CDR3 from Table 9
CASSQDLNEQYF

SEQ ID NO: 3649 - protein, 12 aa, synthetic construct
  REGION 1..12: note = Description of sequence: CDR3 from Table 9
CASSPVGDTQYF

SEQ ID NO: 3650 - protein, 16 aa, synthetic construct
  REGION 1..16: note = Description of sequence: CDR3 from Table 9
CASSLDLAGGFYEQYF

SEQ ID NO: 3651 - protein, 14 aa, synthetic construct
  REGION 1..14: note = Description of sequence: CDR3 from Table 9
CSARDPQGFDGYTF

SEQ ID NO: 3652 - protein, 11 aa, synthetic construct
  REGION 1..11: note = Description of sequence: CDR3 from Table 9
CASSQAGEQYF

SEQ ID NO: 3653 - protein, 12 aa, synthetic construct
  REGION 1..12: note = Description of sequence: CDR3 from Table 9
CASSPYGNTIYF

SEQ ID NO: 3654 - protein, 14 aa, synthetic construct
  REGION 1..14: note = Description of sequence: CDR3 from Table 9
CASSPPGTYNEQFF

SEQ ID NO: 3655 - protein, 11 aa, synthetic construct
  REGION 1..11: note = Description of sequence: CDR3 from Table 9
CSVPSYNEQFF

SEQ ID NO: 3656 - protein, 16 aa, synthetic construct
  REGION 1..16: note = Description of sequence: CDR3 from Table 9
CASSTQGTGVYNEQFF

SEQ ID NO: 3657 - protein, 15 aa, synthetic construct
  REGION 1..15: note = Description of sequence: CDR3 from Table 9
CATSRPTDWVETQYF

SEQ ID NO: 3658 - protein, 12 aa, synthetic construct
  REGION 1..12: note = Description of sequence: CDR3 from Table 9
CASSPTGNEQFF

SEQ ID NO: 3659 - protein, 16 aa, synthetic construct
  REGION 1..16: note = Description of sequence: CDR3 from Table 9
CASSYPSTGSSYEQYF

SEQ ID NO: 3660 - protein, 11 aa, synthetic construct
  REGION 1..11: note = Description of sequence: CDR3 from Table 9
CSVAGGTEAFF

SEQ ID NO: 3661 - protein, 12 aa, synthetic construct
  REGION 1..12: note = Description of sequence: CDR3 from Table 9
CSARGAFHEQYF

SEQ ID NO: 3662 - protein, 15 aa, synthetic construct
  REGION 1..15: note = Description of sequence: CDR3 from Table 9
CASSIQGALTDTQYF

SEQ ID NO: 3663 - protein, 13 aa, synthetic construct
  REGION 1..13: note = Description of sequence: CDR3 from Table 9
CASSPSQGYGYTF

SEQ ID NO: 3664 - protein, 11 aa, synthetic construct
  REGION 1..11: note = Description of sequence: CDR3 from Table 9
CASSYFLEQYF

SEQ ID NO: 3665 - protein, 15 aa, synthetic construct
  REGION 1..15: note = Description of sequence: CDR3 from Table 9
CASSIGGQRYNEQFF

SEQ ID NO: 3666 - protein, 14 aa, synthetic construct
  REGION 1..14: note = Description of sequence: CDR3 from Table 9
CASSGGGAGNEQFF

SEQ ID NO: 3667 - protein, 13 aa, synthetic construct
  REGION 1..13: note = Description of sequence: CDR3 from Table 9
CASSEGQGYEQYF

SEQ ID NO: 3668 - protein, 17 aa, synthetic construct
  REGION 1..17: note = Description of sequence: CDR3 from Table 9
CASSPYGQGGRDTEAFF

SEQ ID NO: 3669 - protein, 11 aa, synthetic construct
  REGION 1..11: note = Description of sequence: CDR3 from Table 9
CASKSNTEAFF

SEQ ID NO: 3670 - protein, 13 aa, synthetic construct
  REGION 1..13: note = Description of sequence: CDR3 from Table 9
CASSPTGSYGYTF

SEQ ID NO: 3671 - protein, 14 aa, synthetic construct
  REGION 1..14: note = Description of sequence: CDR3 from Table 9
CASGTELMNTEAFF

SEQ ID NO: 3672 - protein, 14 aa, synthetic construct
  REGION 1..14: note = Description of sequence: CDR3 from Table 9
CASSETGYAYEQYF

SEQ ID NO: 3673 - protein, 14 aa, synthetic construct
  REGION 1..14: note = Description of sequence: CDR3 from Table 9
CATRDSQSSYEQYF

SEQ ID NO: 3674 - protein, 13 aa, synthetic construct
  REGION 1..13: note = Description of sequence: CDR3 from Table 9
CASSAGQGYEQYF

SEQ ID NO: 3675 - protein, 14 aa, synthetic construct
  REGION 1..14: note = Description of sequence: CDR3 from Table 9
CASSLASQVETQYF

SEQ ID NO: 3676 - protein, 13 aa, synthetic construct
  REGION 1..13: note = Description of sequence: CDR3 from Table 9
CAWSHSGGYEQYF

SEQ ID NO: 3677 - protein, 7 aa, synthetic construct
  REGION 1..7: note = Description of sequence: CDR3 from Table 9
CSGDAFF

SEQ ID NO: 3678 - protein, 11 aa, synthetic construct
  REGION 1..11: note = Description of sequence: CDR3 from Table 9
CASTPGTEAFF

SEQ ID NO: 3679 - protein, 13 aa, synthetic construct
  REGION 1..13: note = Description of sequence: CDR3 from Table 9
CASSDGRADTQYF

SEQ ID NO: 3680 - protein, 12 aa, synthetic construct
  REGION 1..12: note = Description of sequence: CDR3 from Table 9
CASSWLNTEAFF

SEQ ID NO: 3681 - protein, 15 aa, synthetic construct
  REGION 1..15: note = Description of sequence: CDR3 from Table 9
CASSVGGGSNQPQHF

SEQ ID NO: 3682 - protein, 16 aa, synthetic construct
  REGION 1..16: note = Description of sequence: CDR3 from Table 9
CASSGVAEWALETQYF

SEQ ID NO: 3683 - protein, 15 aa, synthetic construct
  REGION 1..15: note = Description of sequence: CDR3 from Table 9
CASRNTGTTNEKLFF

SEQ ID NO: 3684 - protein, 13 aa, synthetic construct
  REGION 1..13: note = Description of sequence: CDR3 from Table 9
CASSPTLADEQYF

SEQ ID NO: 3685 - protein, 17 aa, synthetic construct
  REGION 1..17: note = Description of sequence: CDR3 from Table 9
CASSLPDRGGTKNIQYF

SEQ ID NO: 3686 - protein, 16 aa, synthetic construct
  REGION 1..16: note = Description of sequence: CDR3 from Table 9
CASSLLGQSTNEKLFF

SEQ ID NO: 3687 - protein, 13 aa, synthetic construct
  REGION 1..13: note = Description of sequence: CDR3 from Table 9
CSVDLGTEETQYF

SEQ ID NO: 3688 - protein, 16 aa, synthetic construct
  REGION 1..16: note = Description of sequence: CDR3 from Table 9
CASSPAVGTGDEKLFF

SEQ ID NO: 3689 - protein, 12 aa, synthetic construct
  REGION 1..12: note = Description of sequence: CDR3 from Table 9
CASSEPGPWAFF

SEQ ID NO: 3690 - protein, 13 aa, synthetic construct
  REGION 1..13: note = Description of sequence: CDR3 from Table 9
CASSVTSDQTQYF

SEQ ID NO: 3691 - protein, 14 aa, synthetic construct
  REGION 1..14: note = Description of sequence: CDR3 from Table 9
CASSFRGNTGELFF

SEQ ID NO: 3692 - protein, 16 aa, synthetic construct
  REGION 1..16: note = Description of sequence: CDR3 from Table 9
CASSPTGTGGSDTQYF

SEQ ID NO: 3693 - protein, 14 aa, synthetic construct
  REGION 1..14: note = Description of sequence: CDR3 from Table 9
CASSFMTEAGELFF

SEQ ID NO: 3694 - protein, 13 aa, synthetic construct
  REGION 1..13: note = Description of sequence: CDR3 from Table 9
CASDSGSGQPQHF

SEQ ID NO: 3695 - protein, 11 aa, synthetic construct
  REGION 1..11: note = Description of sequence: CDR3 from Table 9
CASFNTGELFF

SEQ ID NO: 3696 - protein, 17 aa, synthetic construct
  REGION 1..17: note = Description of sequence: CDR3 from Table 9
CSARDPVGGSNTGELFF

SEQ ID NO: 3697 - protein, 11 aa, synthetic construct
  REGION 1..11: note = Description of sequence: CDR3 from Table 9
CASSPTAEAFF

SEQ ID NO: 3698 - protein, 16 aa, synthetic construct
  REGION 1..16: note = Description of sequence: CDR3 from Table 9
CASSQDRGRDQETQYF

SEQ ID NO: 3699 - protein, 16 aa, synthetic construct
  REGION 1..16: note = Description of sequence: CDR3 from Table 9
CASSPLGLAEQETQYF

SEQ ID NO: 3700 - protein, 15 aa, synthetic construct
  REGION 1..15: note = Description of sequence: CDR3 from Table 9
CASSLVRDRHTEAFF

SEQ ID NO: 3701 - protein, 12 aa, synthetic construct
  REGION 1..12: note = Description of sequence: CDR3 from Table 9
CASGGDAYEQYF

SEQ ID NO: 3702 - protein, 16 aa, synthetic construct
  REGION 1..16: note = Description of sequence: CDR3 from Table 9
CASTPGTSASRDTQYF

SEQ ID NO: 3703 - protein, 13 aa, synthetic construct
  REGION 1..13: note = Description of sequence: CDR3 from Table 9
CASSPGTAYEQYF

SEQ ID NO: 3704 - protein, 12 aa, synthetic construct
  REGION 1..12: note = Description of sequence: CDR3 from Table 9
CASSLSADTQYF

SEQ ID NO: 3705 - protein, 11 aa, synthetic construct
  REGION 1..11: note = Description of sequence: CDR3 from Table 9
CASSDGNEQFF

SEQ ID NO: 3706 - protein, 11 aa, synthetic construct
  REGION 1..11: note = Description of sequence: CDR3 from Table 9
CASDSNYGYTF

SEQ ID NO: 3707 - protein, 13 aa, synthetic construct
  REGION 1..13: note = Description of sequence: CDR3 from Table 9
CASSPGTGYEQYF

SEQ ID NO: 3708 - protein, 13 aa, synthetic construct
  REGION 1..13: note = Description of sequence: CDR3 from Table 9
CASSVAGGYEQYF

SEQ ID NO: 3709 - protein, 14 aa, synthetic construct
  REGION 1..14: note = Description of sequence: CDR3 from Table 9
CASSWDRGTYEQYF

SEQ ID NO: 3710 - protein, 14 aa, synthetic construct
  REGION 1..14: note = Description of sequence: CDR3 from Table 9
CASSWRRGTDTQYF

SEQ ID NO: 3711 - protein, 14 aa, synthetic construct
  REGION 1..14: note = Description of sequence: CDR3 from Table 9
CASSLEFGADTQYF

SEQ ID NO: 3712 - protein, 15 aa, synthetic construct
  REGION 1..15: note = Description of sequence: CDR3 from Table 9
CASSRTGSLNYGYTF

SEQ ID NO: 3713 - protein, 13 aa, synthetic construct
  REGION 1..13: note = Description of sequence: CDR3 from Table 9
CASSSQELTEAFF

SEQ ID NO: 3714 - protein, 12 aa, synthetic construct
  REGION 1..12: note = Description of sequence: CDR3 from Table 9
CASSEKPDTQYF

SEQ ID NO: 3715 - protein, 13 aa, synthetic construct
  REGION 1..13: note = Description of sequence: CDR3 from Table 9
CASSPGQGYEQYF

SEQ ID NO: 3716 - protein, 15 aa, synthetic construct
  REGION 1..15: note = Description of sequence: CDR3 from Table 9
CASSTLIGSGNTIYF

SEQ ID NO: 3717 - protein, 14 aa, synthetic construct
  REGION 1..14: note = Description of sequence: CDR3 from Table 9
CASSQVVVGYGYTF

SEQ ID NO: 3718 - protein, 14 aa, synthetic construct
  REGION 1..14: note = Description of sequence: CDR3 from Table 9
CSARTGIGPYEQYF

SEQ ID NO: 3719 - protein, 13 aa, synthetic construct
  REGION 1..13: note = Description of sequence: CDR3 from Table 9
CASSPAPAYEQYF

SEQ ID NO: 3720 - protein, 13 aa, synthetic construct
  REGION 1..13: note = Description of sequence: CDR3 from Table 9
CSARGGGFETQYF

SEQ ID NO: 3721 - protein, 14 aa, synthetic construct
  REGION 1..14: note = Description of sequence: CDR3 from Table 9
CASSMSGWGDTQYF

SEQ ID NO: 3722 - protein, 13 aa, synthetic construct
  REGION 1..13: note = Description of sequence: CDR3 from Table 9
CASSSPSGYEQYF

SEQ ID NO: 3723 - protein, 17 aa, synthetic construct
  REGION 1..17: note = Description of sequence: CDR3 from Table 9
CSARWDRVSSSTDTQYF

SEQ ID NO: 3724 - protein, 15 aa, synthetic construct
  REGION 1..15: note = Description of sequence: CDR3 from Table 9
CASSPTPGTGETQYF

SEQ ID NO: 3725 - protein, 15 aa, synthetic construct
  REGION 1..15: note = Description of sequence: CDR3 from Table 9
CASSRDGPSSYEQYF

SEQ ID NO: 3726 - protein, 13 aa, synthetic construct
  REGION 1..13: note = Description of sequence: CDR3 from Table 9
CASSEGWVDTQYF

SEQ ID NO: 3727 - protein, 13 aa, synthetic construct
  REGION 1..13: note = Description of sequence: CDR3 from Table 9
CASSQATGYEQYF

SEQ ID NO: 3728 - protein, 14 aa, synthetic construct
  REGION 1..14: note = Description of sequence: CDR3 from Table 9
CASSPSGGVYGYTF

SEQ ID NO: 3729 - protein, 16 aa, synthetic construct
  REGION 1..16: note = Description of sequence: CDR3 from Table 9
CASSPPDGQGDYGYTF

SEQ ID NO: 3730 - protein, 13 aa, synthetic construct
  REGION 1..13: note = Description of sequence: CDR3 from Table 9
CASSSLGGYEQYF

SEQ ID NO: 3731 - protein, 13 aa, synthetic construct
  REGION 1..13: note = Description of sequence: CDR3 from Table 9
CASSVSTNYEQYF

SEQ ID NO: 3732 - protein, 14 aa, synthetic construct
  REGION 1..14: note = Description of sequence: CDR3 from Table 9
CSARDVGISYEQYF

SEQ ID NO: 3733 - protein, 15 aa, synthetic construct
  REGION 1..15: note = Description of sequence: CDR3 from Table 9
CASTVRQGSNQPQHF

SEQ ID NO: 3734 - protein, 13 aa, synthetic construct
  REGION 1..13: note = Description of sequence: CDR3 from Table 9
CASSPDRFYEQYF

SEQ ID NO: 3735 - protein, 15 aa, synthetic construct
  REGION 1..15: note = Description of sequence: CDR3 from Table 9
CASSSPGQGYYEQYF

SEQ ID NO: 3736 - protein, 17 aa, synthetic construct
  REGION 1..17: note = Description of sequence: CDR3 from Table 9
CASSYVNGGAIGGELFF

SEQ ID NO: 3737 - protein, 14 aa, synthetic construct
  REGION 1..14: note = Description of sequence: CDR3 from Table 9
CASSLGAGSYEQYF

SEQ ID NO: 3738 - protein, 15 aa, synthetic construct
  REGION 1..15: note = Description of sequence: CDR3 from Table 9
CSVEEWDTSGNTIYF

SEQ ID NO: 3739 - protein, 13 aa, synthetic construct
  REGION 1..13: note = Description of sequence: CDR3 from Table 9
CASSQGEGYEQYF

SEQ ID NO: 3740 - protein, 13 aa, synthetic construct
  REGION 1..13: note = Description of sequence: CDR3 from Table 9
CASNLGGDNEQFF

SEQ ID NO: 3741 - protein, 13 aa, synthetic construct
  REGION 1..13: note = Description of sequence: CDR3 from Table 9
CASSFSGTFEAFF

SEQ ID NO: 3742 - protein, 14 aa, synthetic construct
  REGION 1..14: note = Description of sequence: CDR3 from Table 9
CASSISPSSYEQYF

SEQ ID NO: 3743 - protein, 17 aa, synthetic construct
  REGION 1..17: note = Description of sequence: CDR3 from Table 9
CASSPRTGFSSGNTIYF

SEQ ID NO: 3744 - protein, 12 aa, synthetic construct
  REGION 1..12: note = Description of sequence: CDR3 from Table 9
CASSYSGAEQYF

SEQ ID NO: 3745 - protein, 14 aa, synthetic construct
  REGION 1..14: note = Description of sequence: CDR3 from Table 9
CASSEFTRSYEQYF

SEQ ID NO: 3746 - protein, 13 aa, synthetic construct
  REGION 1..13: note = Description of sequence: CDR3 from Table 9
CASSIAPGNEQYF

SEQ ID NO: 3747 - protein, 15 aa, synthetic construct
  REGION 1..15: note = Description of sequence: CDR3 from Table 9
CASSQYSLSTDTQYF

SEQ ID NO: 3748 - protein, 15 aa, synthetic construct
  REGION 1..15: note = Description of sequence: CDR3 from Table 9
CASSVVGARTDTQYF

SEQ ID NO: 3749 - protein, 16 aa, synthetic construct
  REGION 1..16: note = Description of sequence: CDR3 from Table 9
CASSDPRGQPNQPQHF

SEQ ID NO: 3750 - protein, 13 aa, synthetic construct
  REGION 1..13: note = Description of sequence: CDR3 from Table 9
CASSPGGYYGYTF

SEQ ID NO: 3751 - protein, 13 aa, synthetic construct
  REGION 1..13: note = Description of sequence: CDR3 from Table 9
CASNTGYQETQYF

SEQ ID NO: 3752 - protein, 13 aa, synthetic construct
  REGION 1..13: note = Description of sequence: CDR3 from Table 9
CASSYNQGYEQYF

SEQ ID NO: 3753 - protein, 13 aa, synthetic construct
  REGION 1..13: note = Description of sequence: CDR3 from Table 9
CASSVTPADTQYF

SEQ ID NO: 3754 - protein, 15 aa, synthetic construct
  REGION 1..15: note = Description of sequence: CDR3 from Table 9
CASSLEDSANYGYTF

SEQ ID NO: 3755 - protein, 12 aa, synthetic construct
  REGION 1..12: note = Description of sequence: CDR3 from Table 9
CASSYSGQGYTF

SEQ ID NO: 3756 - protein, 12 aa, synthetic construct
  REGION 1..12: note = Description of sequence: CDR3 from Table 9
CASSSGYNEQFF

SEQ ID NO: 3757 - protein, 11 aa, synthetic construct
  REGION 1..11: note = Description of sequence: CDR3 from Table 9
CASSISTEAFF

SEQ ID NO: 3758 - protein, 15 aa, synthetic construct
  REGION 1..15: note = Description of sequence: CDR3 from Table 9
CASTKTGLGDQPQHF

SEQ ID NO: 3759 - protein, 14 aa, synthetic construct
  REGION 1..14: note = Description of sequence: CDR3 from Table 9
CASSVGGGEVEAFF

SEQ ID NO: 3760 - protein, 18 aa, synthetic construct
  REGION 1..18: note = Description of sequence: CDR3 from Table 9
CSAGIPGQVFSSNEKLFF

SEQ ID NO: 3761 - protein, 14 aa, synthetic construct
  REGION 1..14: note = Description of sequence: CDR3 from Table 9
CASSPYSGANVLTF

SEQ ID NO: 3762 - protein, 14 aa, synthetic construct
  REGION 1..14: note = Description of sequence: CDR3 from Table 9
CASSLAGADNEQFF

SEQ ID NO: 3763 - protein, 14 aa, synthetic construct
  REGION 1..14: note = Description of sequence: CDR3 from Table 9
CASIPVGSRNTIYF

SEQ ID NO: 3764 - protein, 14 aa, synthetic construct
  REGION 1..14: note = Description of sequence: CDR3 from Table 9
CASSLGQGYNEQFF

SEQ ID NO: 3765 - protein, 13 aa, synthetic construct
  REGION 1..13: note = Description of sequence: CDR3 from Table 9
CASSQWGGNEQFF

SEQ ID NO: 3766 - protein, 13 aa, synthetic construct
  REGION 1..13: note = Description of sequence: CDR3 from Table 9
CASAPGLNYEQYF

SEQ ID NO: 3767 - protein, 12 aa, synthetic construct
  REGION 1..12: note = Description of sequence: CDR3 from Table 9
CASSSESGELFF

SEQ ID NO: 3768 - protein, 13 aa, synthetic construct
  REGION 1..13: note = Description of sequence: CDR3 from Table 9
CASSEHRDHEQFF

SEQ ID NO: 3769 - protein, 15 aa, synthetic construct
  REGION 1..15: note = Description of sequence: CDR3 from Table 9
CASSVPGQGVLEQYF

SEQ ID NO: 3770 - protein, 15 aa, synthetic construct
  REGION 1..15: note = Description of sequence: CDR3 from Table 9
CSARDRGSSNEKLFF

SEQ ID NO: 3771 - protein, 14 aa, synthetic construct
  REGION 1..14: note = Description of sequence: CDR3 from Table 9
CASSPDPSGNEQFF

SEQ ID NO: 3772 - protein, 11 aa, synthetic construct
  REGION 1..11: note = Description of sequence: CDR3 from Table 9
CASSYGLEQYF

SEQ ID NO: 3773 - protein, 14 aa, synthetic construct
  REGION 1..14: note = Description of sequence: CDR3 from Table 9
CASSLGQGTYEQYF

SEQ ID NO: 3774 - protein, 13 aa, synthetic construct
  REGION 1..13: note = Description of sequence: CDR3 from Table 9
CASSSAGLPEQYF

SEQ ID NO: 3775 - protein, 13 aa, synthetic construct
  REGION 1..13: note = Description of sequence: CDR3 from Table 9
CASSLDFQGPRDF

SEQ ID NO: 3776 - protein, 14 aa, synthetic construct
  REGION 1..14: note = Description of sequence: CDR3 from Table 9
CASSTGQGGDTQYF

SEQ ID NO: 3777 - protein, 14 aa, synthetic construct
  REGION 1..14: note = Description of sequence: CDR3 from Table 9
CASRRQATNEKLFF

SEQ ID NO: 3778 - protein, 13 aa, synthetic construct
  REGION 1..13: note = Description of sequence: CDR3 from Table 9
CASSMDAYTEAFF

SEQ ID NO: 3779 - protein, 14 aa, synthetic construct
  REGION 1..14: note = Description of sequence: CDR3 from Table 9
CASSSSGGLDTQYF

SEQ ID NO: 3780 - protein, 17 aa, synthetic construct
  REGION 1..17: note = Description of sequence: CDR3 from Table 9
CASSPRLAGGKYNEQFF

SEQ ID NO: 3781 - protein, 14 aa, synthetic construct
  REGION 1..14: note = Description of sequence: CDR3 from Table 9
CASSEERPGEGYTF

SEQ ID NO: 3782 - protein, 16 aa, synthetic construct
  REGION 1..16: note = Description of sequence: CDR3 from Table 9
CASSIPSRTTNYGYTF

SEQ ID NO: 3783 - protein, 13 aa, synthetic construct
  REGION 1..13: note = Description of sequence: CDR3 from Table 9
CARTGAGGNTIYF

SEQ ID NO: 3784 - protein, 13 aa, synthetic construct
  REGION 1..13: note = Description of sequence: CDR3 from Table 9
CASSIAPAYGYTF

SEQ ID NO: 3785 - protein, 15 aa, synthetic construct
  REGION 1..15: note = Description of sequence: CDR3 from Table 9
CSARNRDTYYNEQFF

SEQ ID NO: 3786 - protein, 14 aa, synthetic construct
  REGION 1..14: note = Description of sequence: CDR3 from Table 9
CASSFRRDTDTQYF

SEQ ID NO: 3787 - protein, 14 aa, synthetic construct
  REGION 1..14: note = Description of sequence: CDR3 from Table 9
CASSSWTGGNEQYF

SEQ ID NO: 3788 - protein, 15 aa, synthetic construct
  REGION 1..15: note = Description of sequence: CDR3 from Table 9
CASSVPGTPNTEAFF

SEQ ID NO: 3789 - protein, 16 aa, synthetic construct
  REGION 1..16: note = Description of sequence: CDR3 from Table 9
CASSLSWLDSQETQYF

SEQ ID NO: 3790 - protein, 14 aa, synthetic construct
  REGION 1..14: note = Description of sequence: CDR3 from Table 9
CASSVDGTEETQYF

SEQ ID NO: 3791 - protein, 13 aa, synthetic construct
  REGION 1..13: note = Description of sequence: CDR3 from Table 9
CASSLGGGIEAFF

SEQ ID NO: 3792 - protein, 12 aa, synthetic construct
  REGION 1..12: note = Description of sequence: CDR3 from Table 9
CASSEWDTEAFF

SEQ ID NO: 3793 - protein, 14 aa, synthetic construct
  REGION 1..14: note = Description of sequence: CDR3 from Table 9
CASSAGTIYNEQFF

SEQ ID NO: 3794 - protein, 17 aa, synthetic construct
  REGION 1..17: note = Description of sequence: CDR3 from Table 9
CASSQVRDRDINYGYTF

SEQ ID NO: 3795 - protein, 11 aa, synthetic construct
  REGION 1..11: note = Description of sequence: CDR3 from Table 9
CASSGPRGYTF

SEQ ID NO: 3796 - protein, 13 aa, synthetic construct
  REGION 1..13: note = Description of sequence: CDR3 from Table 9
CASSQDWGAEAFF

SEQ ID NO: 3797 - protein, 18 aa, synthetic construct
  REGION 1..18: note = Description of sequence: CDR3 from Table 9
CASSLVLYDGGLQETQYF

SEQ ID NO: 3798 - protein, 15 aa, synthetic construct
  REGION 1..15: note = Description of sequence: CDR3 from Table 9
CASSAFGIVADTQYF

SEQ ID NO: 3799 - protein, 14 aa, synthetic construct
  REGION 1..14: note = Description of sequence: CDR3 from Table 9
CATSGGQSNEKLFF

SEQ ID NO: 3800 - protein, 15 aa, synthetic construct
  REGION 1..15: note = Description of sequence: CDR3 from Table 9
CASSLSYTPHQPQHF

SEQ ID NO: 3801 - protein, 14 aa, synthetic construct
  REGION 1..14: note = Description of sequence: CDR3 from Table 9
CASSPGGTNEKLFF

SEQ ID NO: 3802 - protein, 16 aa, synthetic construct
  REGION 1..16: note = Description of sequence: CDR3 from Table 9
CASSYLMGQGKGQAFF

SEQ ID NO: 3803 - protein, 12 aa, synthetic construct
  REGION 1..12: note = Description of sequence: CDR3 from Table 9
CASSAGGTEAFF

SEQ ID NO: 3804 - protein, 17 aa, synthetic construct
  REGION 1..17: note = Description of sequence: CDR3 from Table 9
CASSPYGDQLNTGELFF

SEQ ID NO: 3805 - protein, 14 aa, synthetic construct
  REGION 1..14: note = Description of sequence: CDR3 from Table 9
CASNREVSTDTQYF

SEQ ID NO: 3806 - protein, 15 aa, synthetic construct
  REGION 1..15: note = Description of sequence: CDR3 from Table 9
CASRGTGTGSYEQYF

SEQ ID NO: 3807 - protein, 12 aa, synthetic construct
  REGION 1..12: note = Description of sequence: CDR3 from Table 9
CSVPGTAYEQYF

SEQ ID NO: 3808 - protein, 14 aa, synthetic construct
  REGION 1..14: note = Description of sequence: CDR3 from Table 9
CAISDLDSNQPQHF

SEQ ID NO: 3809 - protein, 14 aa, synthetic construct
  REGION 1..14: note = Description of sequence: CDR3 from Table 9
CASSISGGSYEQYF

SEQ ID NO: 3810 - protein, 17 aa, synthetic construct
  REGION 1..17: note = Description of sequence: CDR3 from Table 9
CASSLSWEDENTDTQYF

SEQ ID NO: 3811 - protein, 15 aa, synthetic construct
  REGION 1..15: note = Description of sequence: CDR3 from Table 9
CSARVPTSFTDTQYF

SEQ ID NO: 3812 - protein, 15 aa, synthetic construct
  REGION 1..15: note = Description of sequence: CDR3 from Table 9
CASSASEPSGETQYF

SEQ ID NO: 3813 - protein, 17 aa, synthetic construct
  REGION 1..17: note = Description of sequence: CDR3 from Table 9
CASSFPVSDPSTDTQYF

SEQ ID NO: 3814 - protein, 11 aa, synthetic construct
  REGION 1..11: note = Description of sequence: CDR3 from Table 9
CASSFGETQYF

SEQ ID NO: 3815 - protein, 14 aa, synthetic construct
  REGION 1..14: note = Description of sequence: CDR3 from Table 9
CASSPTSGGYEQYF

SEQ ID NO: 3816 - protein, 11 aa, synthetic construct
  REGION 1..11: note = Description of sequence: CDR3 from Table 9
CASGPNQPQHF

SEQ ID NO: 3817 - protein, 16 aa, synthetic construct
  REGION 1..16: note = Description of sequence: CDR3 from Table 9
CASSPWTGSYQETQYF

SEQ ID NO: 3818 - protein, 13 aa, synthetic construct
  REGION 1..13: note = Description of sequence: CDR3 from Table 9
CARTGEDNSPLHF

SEQ ID NO: 3819 - protein, 13 aa, synthetic construct
  REGION 1..13: note = Description of sequence: CDR3 from Table 9
CASSTGISYEQYF

SEQ ID NO: 3820 - protein, 15 aa, synthetic construct
  REGION 1..15: note = Description of sequence: CDR3 from Table 9
CASSEEVSDDSPLHF

SEQ ID NO: 3821 - protein, 14 aa, synthetic construct
  REGION 1..14: note = Description of sequence: CDR3 from Table 9
CASGRSGEDYGYTF

SEQ ID NO: 3822 - protein, 17 aa, synthetic construct
  REGION 1..17: note = Description of sequence: CDR3 from Table 9
CASSQNPGQGIYSPLHF

SEQ ID NO: 3823 - protein, 16 aa, synthetic construct
  REGION 1..16: note = Description of sequence: CDR3 from Table 9
CASSGQGAYITDTQYF

SEQ ID NO: 3824 - protein, 13 aa, synthetic construct
  REGION 1..13: note = Description of sequence: CDR3 from Table 9
CASSLASGNEQFF

SEQ ID NO: 3825 - protein, 13 aa, synthetic construct
  REGION 1..13: note = Description of sequence: CDR3 from Table 9
CASSKGGNQPQHF

SEQ ID NO: 3826 - protein, 19 aa, synthetic construct
  REGION 1..19: note = Description of sequence: CDR3 from Table 9
CASSLAKMDLPLAKNIQYF

SEQ ID NO: 3827 - protein, 16 aa, synthetic construct
  REGION 1..16: note = Description of sequence: CDR3 from Table 9
CASSQGDRDSGNTIYF

SEQ ID NO: 3828 - protein, 12 aa, synthetic construct
  REGION 1..12: note = Description of sequence: CDR3 from Table 9
CASSLGGDEQYF

SEQ ID NO: 3829 - protein, 16 aa, synthetic construct
  REGION 1..16: note = Description of sequence: CDR3 from Table 9
CASSMPTGTDSYEQYF

SEQ ID NO: 3830 - protein, 15 aa, synthetic construct
  REGION 1..15: note = Description of sequence: CDR3 from Table 9
CSAIVFSRGGDEQFF

SEQ ID NO: 3831 - protein, 14 aa, synthetic construct
  REGION 1..14: note = Description of sequence: CDR3 from Table 9
CASSPAGTDYGYTF

SEQ ID NO: 3832 - protein, 17 aa, synthetic construct
  REGION 1..17: note = Description of sequence: CDR3 from Table 9
CASSSINRDKMNTEAFF

SEQ ID NO: 3833 - protein, 13 aa, synthetic construct
  REGION 1..13: note = Description of sequence: CDR3 from Table 9
CASSPGTSYEQYF

SEQ ID NO: 3834 - protein, 17 aa, synthetic construct
  REGION 1..17: note = Description of sequence: CDR3 from Table 9
CASSLAVGQPGEEEQYF

SEQ ID NO: 3835 - protein, 16 aa, synthetic construct
  REGION 1..16: note = Description of sequence: CDR3 from Table 9
CASSKGAGVFQETQYF

SEQ ID NO: 3836 - protein, 14 aa, synthetic construct
  REGION 1..14: note = Description of sequence: CDR3 from Table 9
CSAHPRDVQETQYF

SEQ ID NO: 3837 - protein, 17 aa, synthetic construct
  REGION 1..17: note = Description of sequence: CDR3 from Table 9
CASSSTREQLIGEKLFF

SEQ ID NO: 3838 - protein, 16 aa, synthetic construct
  REGION 1..16: note = Description of sequence: CDR3 from Table 9
CASSLNRGLNTGELFF

SEQ ID NO: 3839 - protein, 15 aa, synthetic construct
  REGION 1..15: note = Description of sequence: CDR3 from Table 9
CASSFSSLDNYGYTF

SEQ ID NO: 3840 - protein, 17 aa, synthetic construct
  REGION 1..17: note = Description of sequence: CDR3 from Table 9
CASDPDSLIHNTGELFF

SEQ ID NO: 3841 - protein, 18 aa, synthetic construct
  REGION 1..18: note = Description of sequence: CDR3 from Table 9
CASSSTGTGGSYNSPLHF

SEQ ID NO: 3842 - protein, 13 aa, synthetic construct
  REGION 1..13: note = Description of sequence: CDR3 from Table 9
CASSDNDWRLQYF

SEQ ID NO: 3843 - protein, 16 aa, synthetic construct
  REGION 1..16: note = Description of sequence: CDR3 from Table 9
CASSSPTSGADNEQFF

SEQ ID NO: 3844 - protein, 13 aa, synthetic construct
  REGION 1..13: note = Description of sequence: CDR3 from Table 9
CASSYSNGYEQYF

SEQ ID NO: 3845 - protein, 12 aa, synthetic construct
  REGION 1..12: note = Description of sequence: CDR3 from Table 9
CASSPGGYGYTF

SEQ ID NO: 3846 - protein, 16 aa, synthetic construct
  REGION 1..16: note = Description of sequence: CDR3 from Table 9
CASSFWGLPHQETQYF

SEQ ID NO: 3847 - protein, 11 aa, synthetic construct
  REGION 1..11: note = Description of sequence: CDR3 from Table 9
CASSLASEQYF

SEQ ID NO: 3848 - protein, 15 aa, synthetic construct
  REGION 1..15: note = Description of sequence: CDR3 from Table 9
CASSADRTQNYGYTF

SEQ ID NO: 3849 - protein, 15 aa, synthetic construct
  REGION 1..15: note = Description of sequence: CDR3 from Table 9
CSAYPAGDGTGELFF

SEQ ID NO: 3850 - protein, 15 aa, synthetic construct
  REGION 1..15: note = Description of sequence: CDR3 from Table 9
CASSPPLWGVYGYTF

SEQ ID NO: 3851 - protein, 13 aa, synthetic construct
  REGION 1..13: note = Description of sequence: CDR3 from Table 9
CATSRWTGNEQFF

SEQ ID NO: 3852 - protein, 16 aa, synthetic construct
  REGION 1..16: note = Description of sequence: CDR3 from Table 9
CASSLRGEKNNYGYTF

SEQ ID NO: 3853 - protein, 15 aa, synthetic construct
  REGION 1..15: note = Description of sequence: CDR3 from Table 9
CASSIQGNSNQPQHF

SEQ ID NO: 3854 - protein, 15 aa, synthetic construct
  REGION 1..15: note = Description of sequence: CDR3 from Table 9
CASSLVRADGETQYF

SEQ ID NO: 3855 - protein, 15 aa, synthetic construct
  REGION 1..15: note = Description of sequence: CDR3 from Table 9
CASSATGTVNTEAFF

SEQ ID NO: 3856 - protein, 12 aa, synthetic construct
  REGION 1..12: note = Description of sequence: CDR3 from Table 9
CASSIGGYGYTF

SEQ ID NO: 3857 - protein, 12 aa, synthetic construct
  REGION 1..12: note = Description of sequence: CDR3 from Table 9
CASTGTSYEQYF

SEQ ID NO: 3858 - protein, 15 aa, synthetic construct
  REGION 1..15: note = Description of sequence: CDR3 from Table 9
CASSPSGTGFYEQYF

SEQ ID NO: 3859 - protein, 13 aa, synthetic construct
  REGION 1..13: note = Description of sequence: CDR3 from Table 9
CSARVQGAYEQYF

SEQ ID NO: 3860 - protein, 15 aa, synthetic construct
  REGION 1..15: note = Description of sequence: CDR3 from Table 9
CASSQVLGFSYEQYF

SEQ ID NO: 3861 - protein, 13 aa, synthetic construct
  REGION 1..13: note = Description of sequence: CDR3 from Table 9
CASSRKGDSPLHF

SEQ ID NO: 3862 - protein, 16 aa, synthetic construct
  REGION 1..16: note = Description of sequence: CDR3 from Table 9
CASSHDDRGPNEKLFF

SEQ ID NO: 3863 - protein, 12 aa, synthetic construct
  REGION 1..12: note = Description of sequence: CDR3 from Table 9
CASSTGGDTQYF

SEQ ID NO: 3864 - protein, 13 aa, synthetic construct
  REGION 1..13: note = Description of sequence: CDR3 from Table 9
CASSYGHPGEQYF

SEQ ID NO: 3865 - protein, 14 aa, synthetic construct
  REGION 1..14: note = Description of sequence: CDR3 from Table 9
CSALTGLGNYGYTF

SEQ ID NO: 3866 - protein, 13 aa, synthetic construct
  REGION 1..13: note = Description of sequence: CDR3 from Table 9
CASSSDSSYEQYF

SEQ ID NO: 3867 - protein, 16 aa, synthetic construct
  REGION 1..16: note = Description of sequence: CDR3 from Table 9
CASTPGGSSYNSPLHF

SEQ ID NO: 3868 - protein, 12 aa, synthetic construct
  REGION 1..12: note = Description of sequence: CDR3 from Table 9
CASSFNYNEQFF

SEQ ID NO: 3869 - protein, 14 aa, synthetic construct
  REGION 1..14: note = Description of sequence: CDR3 from Table 9
CASRSRGGHSPLHF

SEQ ID NO: 3870 - protein, 12 aa, synthetic construct
  REGION 1..12: note = Description of sequence: CDR3 from Table 9
CASSFGPDEQYF

SEQ ID NO: 3871 - protein, 14 aa, synthetic construct
  REGION 1..14: note = Description of sequence: CDR3 from Table 9
CASSSTGDNSPLHF

SEQ ID NO: 3872 - protein, 15 aa, synthetic construct
  REGION 1..15: note = Description of sequence: CDR3 from Table 9
CASQSWRGMNTEAFF

SEQ ID NO: 3873 - protein, 20 aa, synthetic construct
  REGION 1..20: note = Description of sequence: CDR3 from Table 9
CASSSPWGGTTDTSTDTQYF

SEQ ID NO: 3874 - protein, 14 aa, synthetic construct
  REGION 1..14: note = Description of sequence: CDR3 from Table 9
CASSRGGLTDTQYF

SEQ ID NO: 3875 - protein, 14 aa, synthetic construct
  REGION 1..14: note = Description of sequence: CDR3 from Table 9
CASSFLSSYNEQFF

SEQ ID NO: 3876 - protein, 13 aa, synthetic construct
  REGION 1..13: note = Description of sequence: CDR3 from Table 9
CASSGPEAYEQYF

SEQ ID NO: 3877 - protein, 14 aa, synthetic construct
  REGION 1..14: note = Description of sequence: CDR3 from Table 9
CAISESKGNYGYTF

SEQ ID NO: 3878 - protein, 15 aa, synthetic construct
  REGION 1..15: note = Description of sequence: CDR3 from Table 9
CASSAPGQGNEKLFF

SEQ ID NO: 3879 - protein, 14 aa, synthetic construct
  REGION 1..14: note = Description of sequence: CDR3 from Table 9
CASSIVDRPYEQYF

SEQ ID NO: 3880 - protein, 14 aa, synthetic construct
  REGION 1..14: note = Description of sequence: CDR3 from Table 9
CATSRGTGAGEQYF

SEQ ID NO: 3881 - protein, 13 aa, synthetic construct
  REGION 1..13: note = Description of sequence: CDR3 from Table 9
RASSPRTGGEQYF

SEQ ID NO: 3882 - protein, 14 aa, synthetic construct
  REGION 1..14: note = Description of sequence: CDR3 from Table 9
CASSYLDGAYEQYF

SEQ ID NO: 3883 - protein, 15 aa, synthetic construct
  REGION 1..15: note = Description of sequence: CDR3 from Table 9
CASSTGADLTYEQYF

SEQ ID NO: 3884 - protein, 14 aa, synthetic construct
  REGION 1..14: note = Description of sequence: CDR3 from Table 9
CASSFTRDLYGYTF

SEQ ID NO: 3885 - protein, 17 aa, synthetic construct
  REGION 1..17: note = Description of sequence: CDR3 from Table 9
CASSLAVGETRNSPLHF

SEQ ID NO: 3886 - protein, 13 aa, synthetic construct
  REGION 1..13: note = Description of sequence: CDR3 from Table 9
CASSGTGGYEQYF

SEQ ID NO: 3887 - protein, 17 aa, synthetic construct
  REGION 1..17: note = Description of sequence: CDR3 from Table 9
CASSLAGDRGRNSPLHF

SEQ ID NO: 3888 - protein, 14 aa, synthetic construct
  REGION 1..14: note = Description of sequence: CDR3 from Table 9
CASSPWTGAEKLFF

SEQ ID NO: 3889 - protein, 17 aa, synthetic construct
  REGION 1..17: note = Description of sequence: CDR3 from Table 9
CASSYFFEGLNTGELFF

SEQ ID NO: 3890 - protein, 16 aa, synthetic construct
  REGION 1..16: note = Description of sequence: CDR3 from Table 9
CASSSPSGGRTDTQYF

SEQ ID NO: 3891 - protein, 16 aa, synthetic construct
  REGION 1..16: note = Description of sequence: CDR3 from Table 9
CASSFFASGDTDTQYF

SEQ ID NO: 3892 - protein, 15 aa, synthetic construct
  REGION 1..15: note = Description of sequence: CDR3 from Table 9
CASSLEGTSLNEQFF

SEQ ID NO: 3893 - protein, 14 aa, synthetic construct
  REGION 1..14: note = Description of sequence: CDR3 from Table 9
CASSPDSDHYGYTF

SEQ ID NO: 3894 - protein, 13 aa, synthetic construct
  REGION 1..13: note = Description of sequence: CDR3 from Table 9
CASSQFMNTEAFF

SEQ ID NO: 3895 - protein, 12 aa, synthetic construct
  REGION 1..12: note = Description of sequence: CDR3 from Table 9
CASSLQGNGYTF

SEQ ID NO: 3896 - protein, 13 aa, synthetic construct
  REGION 1..13: note = Description of sequence: CDR3 from Table 9
CASSLGGLSGYTF

SEQ ID NO: 3897 - protein, 13 aa, synthetic construct
  REGION 1..13: note = Description of sequence: CDR3 from Table 9
CASSFQGGTGYTF

SEQ ID NO: 3898 - protein, 12 aa, synthetic construct
  REGION 1..12: note = Description of sequence: CDR3 from Table 9
CASSEDGYEQYF

SEQ ID NO: 3899 - protein, 13 aa, synthetic construct
  REGION 1..13: note = Description of sequence: CDR3 from Table 9
CASKNDGNSPLHF

SEQ ID NO: 3900 - protein, 13 aa, synthetic construct
  REGION 1..13: note = Description of sequence: CDR3 from Table 9
CASSLVTSGEQFF

SEQ ID NO: 3901 - protein, 13 aa, synthetic construct
  REGION 1..13: note = Description of sequence: CDR3 from Table 9
CASSLPDNNEQFF

SEQ ID NO: 3902 - protein, 11 aa, synthetic construct
  REGION 1..11: note = Description of sequence: CDR3 from Table 9
CSATDVWGYTF

SEQ ID NO: 3903 - protein, 14 aa, synthetic construct
  REGION 1..14: note = Description of sequence: CDR3 from Table 9
CASSNLGGTDTQYF

SEQ ID NO: 3904 - protein, 16 aa, synthetic construct
  REGION 1..16: note = Description of sequence: CDR3 from Table 9
CASSSPSQGITGELFF

SEQ ID NO: 3905 - protein, 17 aa, synthetic construct
  REGION 1..17: note = Description of sequence: CDR3 from Table 9
CASSFWRDGATNEKLFF

SEQ ID NO: 3906 - protein, 14 aa, synthetic construct
  REGION 1..14: note = Description of sequence: CDR3 from Table 9
CASSFSAREYGYTF

SEQ ID NO: 3907 - protein, 13 aa, synthetic construct
  REGION 1..13: note = Description of sequence: CDR3 from Table 9
CASSFGANYGYTF

SEQ ID NO: 3908 - protein, 14 aa, synthetic construct
  REGION 1..14: note = Description of sequence: CDR3 from Table 9
CASSLYVYSYEQYF

SEQ ID NO: 3909 - protein, 12 aa, synthetic construct
  REGION 1..12: note = Description of sequence: CDR3 from Table 9
CASSLMGAEAFF

SEQ ID NO: 3910 - protein, 15 aa, synthetic construct
  REGION 1..15: note = Description of sequence: CDR3 from Table 9
CASSQAGDGSYEQYF

SEQ ID NO: 3911 - protein, 13 aa, synthetic construct
  REGION 1..13: note = Description of sequence: CDR3 from Table 9
CASSQLDYNEQFF

SEQ ID NO: 3912 - protein, 15 aa, synthetic construct
  REGION 1..15: note = Description of sequence: CDR3 from Table 9
CASSFWSGGTYEQYF

SEQ ID NO: 3913 - protein, 15 aa, synthetic construct
  REGION 1..15: note = Description of sequence: CDR3 from Table 9
CASSATSGAYNEQFF

SEQ ID NO: 3914 - protein, 14 aa, synthetic construct
  REGION 1..14: note = Description of sequence: CDR3 from Table 9
CSARAVTNTGELFF

SEQ ID NO: 3915 - protein, 13 aa, synthetic construct
  REGION 1..13: note = Description of sequence: CDR3 from Table 9
CASSLQGGGGYTF

SEQ ID NO: 3916 - protein, 11 aa, synthetic construct
  REGION 1..11: note = Description of sequence: CDR3 from Table 9
CASSQVGQGQF

SEQ ID NO: 3917 - protein, 13 aa, synthetic construct
  REGION 1..13: note = Description of sequence: CDR3 from Table 9
CASSVYSTDTQYF

SEQ ID NO: 3918 - protein, 16 aa, synthetic construct
  REGION 1..16: note = Description of sequence: CDR3 from Table 9
CASSYLGRVNKNIQYF

SEQ ID NO: 3919 - protein, 12 aa, synthetic construct
  REGION 1..12: note = Description of sequence: CDR3 from Table 9
CASSLGGTEAFF

SEQ ID NO: 3920 - protein, 15 aa, synthetic construct
  REGION 1..15: note = Description of sequence: CDR3 from Table 9
CSARNRASYNSPLHF

SEQ ID NO: 3921 - protein, 13 aa, synthetic construct
  REGION 1..13: note = Description of sequence: CDR3 from Table 9
CASSQQGFYEQYF

SEQ ID NO: 3922 - protein, 14 aa, synthetic construct
  REGION 1..14: note = Description of sequence: CDR3 from Table 9
CATTPDRGHQPQHF

SEQ ID NO: 3923 - protein, 15 aa, synthetic construct
  REGION 1..15: note = Description of sequence: CDR3 from Table 9
CASSYLEGDNYGYTF

SEQ ID NO: 3924 - protein, 16 aa, synthetic construct
  REGION 1..16: note = Description of sequence: CDR3 from Table 9
CASSLGHFEGNQPQHF

SEQ ID NO: 3925 - protein, 12 aa, synthetic construct
  REGION 1..12: note = Description of sequence: CDR3 from Table 9
CSVTGNNYGYTF

SEQ ID NO: 3926 - protein, 19 aa, synthetic construct
  REGION 1..19: note = Description of sequence: CDR3 from Table 9
CASSSETNWGTGGNQPQHF

SEQ ID NO: 3927 - protein, 14 aa, synthetic construct
  REGION 1..14: note = Description of sequence: CDR3 from Table 9
CASSMTVMNTEAFF

SEQ ID NO: 3928 - protein, 16 aa, synthetic construct
  REGION 1..16: note = Description of sequence: CDR3 from Table 9
CASSVDFGRTYNEQFF

SEQ ID NO: 3929 - protein, 17 aa, synthetic construct
  REGION 1..17: note = Description of sequence: CDR3 from Table 9
CASSLVPSGQANTEAFF

SEQ ID NO: 3930 - protein, 12 aa, synthetic construct
  REGION 1..12: note = Description of sequence: CDR3 from Table 9
CASSYRGVEQYF

SEQ ID NO: 3931 - protein, 15 aa, synthetic construct
  REGION 1..15: note = Description of sequence: CDR3 from Table 9
CASSTEGRSSYEQYF

SEQ ID NO: 3932 - protein, 13 aa, synthetic construct
  REGION 1..13: note = Description of sequence: CDR3 from Table 9
CASSLSPTDTQYF

SEQ ID NO: 3933 - protein, 14 aa, synthetic construct
  REGION 1..14: note = Description of sequence: CDR3 from Table 9
CSARVRGDHNEQFF

SEQ ID NO: 3934 - protein, 17 aa, synthetic construct
  REGION 1..17: note = Description of sequence: CDR3 from Table 9
CASSSYTDKKSPGELFF

SEQ ID NO: 3935 - protein, 11 aa, synthetic construct
  REGION 1..11: note = Description of sequence: CDR3 from Table 9
CASSPTDTQYF

SEQ ID NO: 3936 - protein, 17 aa, synthetic construct
  REGION 1..17: note = Description of sequence: CDR3 from Table 9
CASSLERGMGSNQPQHF

SEQ ID NO: 3937 - protein, 14 aa, synthetic construct
  REGION 1..14: note = Description of sequence: CDR3 from Table 9
CASSDWTGSNEQFF

SEQ ID NO: 3938 - protein, 14 aa, synthetic construct
  REGION 1..14: note = Description of sequence: CDR3 from Table 9
CASSNTGGRETQYF

SEQ ID NO: 3939 - protein, 14 aa, synthetic construct
  REGION 1..14: note = Description of sequence: CDR3 from Table 9
CASSSSGGGTEQFF

SEQ ID NO: 3940 - protein, 13 aa, synthetic construct
  REGION 1..13: note = Description of sequence: CDR3 from Table 9
CATWTGGGSEAFF

SEQ ID NO: 3941 - protein, 16 aa, synthetic construct
  REGION 1..16: note = Description of sequence: CDR3 from Table 9
CASSRYGGPSDNEQFF

SEQ ID NO: 3942 - protein, 13 aa, synthetic construct
  REGION 1..13: note = Description of sequence: CDR3 from Table 9
CAIRDRLNTEAFF

SEQ ID NO: 3943 - protein, 17 aa, synthetic construct
  REGION 1..17: note = Description of sequence: CDR3 from Table 9
CASSQGTSRDRNQPQHF

SEQ ID NO: 3944 - protein, 17 aa, synthetic construct
  REGION 1..17: note = Description of sequence: CDR3 from Table 9
CASTLGGEGRNTGELFF

SEQ ID NO: 3945 - protein, 12 aa, synthetic construct
  REGION 1..12: note = Description of sequence: CDR3 from Table 9
CARGSGGETQYF

SEQ ID NO: 3946 - protein, 14 aa, synthetic construct
  REGION 1..14: note = Description of sequence: CDR3 from Table 9
CASSQSETGDGYTF

SEQ ID NO: 3947 - protein, 13 aa, synthetic construct
  REGION 1..13: note = Description of sequence: CDR3 from Table 9
CASSITFSDTQYF

SEQ ID NO: 3948 - protein, 13 aa, synthetic construct
  REGION 1..13: note = Description of sequence: CDR3 from Table 9
CASSQALDQPQHF

SEQ ID NO: 3949 - protein, 15 aa, synthetic construct
  REGION 1..15: note = Description of sequence: CDR3 from Table 9
CASSNRDRGPYEQYF

SEQ ID NO: 3950 - protein, 17 aa, synthetic construct
  REGION 1..17: note = Description of sequence: CDR3 from Table 9
CSARQTSGGSSYNEQFF

SEQ ID NO: 3951 - protein, 14 aa, synthetic construct
  REGION 1..14: note = Description of sequence: CDR3 from Table 9
CASSSLGLFAEQFF

SEQ ID NO: 3952 - protein, 13 aa, synthetic construct
  REGION 1..13: note = Description of sequence: CDR3 from Table 9
CASSEGQNTEAFF

SEQ ID NO: 3953 - protein, 13 aa, synthetic construct
  REGION 1..13: note = Description of sequence: CDR3 from Table 9
CASSTGPYNEQFF

SEQ ID NO: 3954 - protein, 14 aa, synthetic construct
  REGION 1..14: note = Description of sequence: CDR3 from Table 9
CASSLTGSSDTQYF

SEQ ID NO: 3955 - protein, 16 aa, synthetic construct
  REGION 1..16: note = Description of sequence: CDR3 from Table 9
CASSQAGQGFRTEAFF

SEQ ID NO: 3956 - protein, 15 aa, synthetic construct
  REGION 1..15: note = Description of sequence: CDR3 from Table 9
CASSLGQERPYEQYF

SEQ ID NO: 3957 - protein, 13 aa, synthetic construct
  REGION 1..13: note = Description of sequence: CDR3 from Table 9
CASSFGQGYEQYF

SEQ ID NO: 3958 - protein, 15 aa, synthetic construct
  REGION 1..15: note = Description of sequence: CDR3 from Table 9
CASRPGGGSYNEQFF

SEQ ID NO: 3959 - protein, 15 aa, synthetic construct
  REGION 1..15: note = Description of sequence: CDR3 from Table 9
CASSQEQLSTYEQYF

SEQ ID NO: 3960 - protein, 17 aa, synthetic construct
  REGION 1..17: note = Description of sequence: CDR3 from Table 9
RASSFTAPGLQYNEQFF

SEQ ID NO: 3961 - protein, 14 aa, synthetic construct
  REGION 1..14: note = Description of sequence: CDR3 from Table 9
CASSEFRNVGGYTF

SEQ ID NO: 3962 - protein, 14 aa, synthetic construct
  REGION 1..14: note = Description of sequence: CDR3 from Table 9
CASLKMGGLDEQFF

SEQ ID NO: 3963 - protein, 15 aa, synthetic construct
  REGION 1..15: note = Description of sequence: CDR3 from Table 9
CASRVSASSYNEQFF

SEQ ID NO: 3964 - protein, 9 aa, synthetic construct
  REGION 1..9: note = Description of sequence: NYESO1-V165 from Expermint 1 of Table 10
SLLMWITQV

SEQ ID NO: 3965 - protein, 9 aa, synthetic construct
  REGION 1..9: note = Description of sequence: ADI-SVA from Expermint 1 of Table 10
SVASTITGV

SEQ ID NO: 3966 - protein, 9 aa, synthetic construct
  REGION 1..9: note = Description of sequence: BRA-AG from Expermint 1 of Table 10
WLLPGTSTV

SEQ ID NO: 3967 - protein, 9 aa, synthetic construct
  REGION 1..9: note = Description of sequence: BRA-NA from Expermint 1 of Table 10
WLLPGTSTL

SEQ ID NO: 3968 - protein, 9 aa, synthetic construct
  REGION 1..9: note = Description of sequence: CD1-LLG from Expermint 1 of Table 10
LLGATCMFV

SEQ ID NO: 3969 - protein, 9 aa, synthetic construct
  REGION 1..9: note = Description of sequence: GP100-IMD from Expermint 1 of Table 10
IMDQVPFSV

SEQ ID NO: 3970 - protein, 10 aa, synthetic construct
  REGION 1..10: note = Description of sequence: GP100-AML from Expermint 1 of Table 10
AMLGTHTMEV

SEQ ID NO: 3971 - protein, 9 aa, synthetic construct
  REGION 1..9: note = Description of sequence: GP100-ITD from Expermint 1 of Table 10
ITDQVPFSV

SEQ ID NO: 3972 - protein, 9 aa, synthetic construct
  REGION 1..9: note = Description of sequence: GP100-KTW from Expermint 1 of Table 10
KTWGQYWQV

SEQ ID NO: 3973 - protein, 9 aa, synthetic construct
  REGION 1..9: note = Description of sequence: GP100-YLE from Expermint 1 of Table 10
YLEPGPVTA

SEQ ID NO: 3974 - protein, 9 aa, synthetic construct
  REGION 1..9: note = Description of sequence: GPC-FVG from Expermint 1 of Table 10
FVGEFFTDV

SEQ ID NO: 3975 - protein, 9 aa, synthetic construct
  REGION 1..9: note = Description of sequence: HAFP-FMN from Expermint 1 of Table 10
FMNKFIYEI

SEQ ID NO: 3976 - protein, 10 aa, synthetic construct
  REGION 1..10: note = Description of sequence: HAFP-GLS from Expermint 1 of Table 10
GLSPNLNRFL

SEQ ID NO: 3977 - protein, 9 aa, synthetic construct
  REGION 1..9: note = Description of sequence: MAGEA10-GLY from Expermint 1 of Table 10
GLYDGMEHL

SEQ ID NO: 3978 - protein, 10 aa, synthetic construct
  REGION 1..10: note = Description of sequence: MAGEC2-LLF from Expermint 1 of Table 10
LLFGLALIEV

SEQ ID NO: 3979 - protein, 10 aa, synthetic construct
  REGION 1..10: note = Description of sequence: MART1-A2L from Expermint 1 of Table 10
ELAGIGILTV

SEQ ID NO: 3980 - protein, 9 aa, synthetic construct
  REGION 1..9: note = Description of sequence: MART1-ALM from Expermint 1 of Table 10
ALMDKSLHV

SEQ ID NO: 3981 - protein, 9 aa, synthetic construct
  REGION 1..9: note = Description of sequence: MG50-CMH from Expermint 1 of Table 10
CMHLLLEAV

SEQ ID NO: 3982 - protein, 9 aa, synthetic construct
  REGION 1..9: note = Description of sequence: NYESO1-9A from Expermint 1 of Table 10
SLLMWITQA

SEQ ID NO: 3983 - protein, 9 aa, synthetic construct
  REGION 1..9: note = Description of sequence: TYR-YMD from Expermint 1 of Table 10
YMDGTMSQV

SEQ ID NO: 3984 - protein, 10 aa, synthetic construct
  REGION 1..10: note = Description of sequence: TYR-CLL from Expermint 1 of Table 10
CLLWSFQTSA

SEQ ID NO: 3985 - protein, 9 aa, synthetic construct
  REGION 1..9: note = Description of sequence: WT1-RMF from Expermint 1 of Table 10
RMFPNAPYL

SEQ ID NO: 3986 - protein, 9 aa, synthetic construct
  REGION 1..9: note = Description of sequence: AGL-GLI from Expermint 1 of Table 10
QLIPCMDVV

SEQ ID NO: 3987 - protein, 9 aa, synthetic construct
  REGION 1..9: note = Description of sequence: EF2-ILT from Expermint 1 of Table 10
ILTDITKGV

SEQ ID NO: 3988 - protein, 9 aa, synthetic construct
  REGION 1..9: note = Description of sequence: FBA-ALS from Expermint 1 of Table 10
ALSDHHIYL

SEQ ID NO: 3989 - protein, 9 aa, synthetic construct
  REGION 1..9: note = Description of sequence: HA-VLH from Expermint 1 of Table 10
VLHDDLLEA

SEQ ID NO: 3990 - protein, 9 aa, synthetic construct
  REGION 1..9: note = Description of sequence: KER-ALL from Expermint 1 of Table 10
ALLNIKVKL

SEQ ID NO: 3991 - protein, 9 aa, synthetic construct
  REGION 1..9: note = Description of sequence: L19-ILM from Expermint 1 of Table 10
ILMEHIHKL

SEQ ID NO: 3992 - protein, 9 aa, synthetic construct
  REGION 1..9: note = Description of sequence: PD5-KLS from Expermint 1 of Table 10
KLSEGDLLA

SEQ ID NO: 3993 - protein, 9 aa, synthetic construct
  REGION 1..9: note = Description of sequence: PP1-SII from Expermint 1 of Table 10
SIIGRLLEV

SEQ ID NO: 3994 - protein, 9 aa, synthetic construct
  REGION 1..9: note = Description of sequence: DDX5-YLL from Expermint 1 of Table 10
YLLPAIVHI

SEQ ID NO: 3995 - protein, 9 aa, synthetic construct
  REGION 1..9: note = Description of sequence: SMCY-FID from Expermint 1 of Table 10
FIDSYICQV

SEQ ID NO: 3996 - protein, 9 aa, synthetic construct
  REGION 1..9: note = Description of sequence: SNPG-IML from Expermint 1 of Table 10
IMLEALERV

SEQ ID NO: 3997 - protein, 10 aa, synthetic construct
  REGION 1..10: note = Description of sequence: GAD-RMM from Expermint 1 of Table 10
RMMEYGTTMV

SEQ ID NO: 3998 - protein, 10 aa, synthetic construct
  REGION 1..10: note = Description of sequence: GAD65-VMN from Expermint 1 of Table 10
VMNILLQYVV

SEQ ID NO: 3999 - protein, 10 aa, synthetic construct
  REGION 1..10: note = Description of sequence: GFAP-NLA from Expermint 1 of Table 10
NLAQTDLATV

SEQ ID NO: 4000 - protein, 10 aa, synthetic construct
  REGION 1..10: note = Description of sequence: HCHGA-LLC from Expermint 1 of Table 10
LLCAGQVTAL

SEQ ID NO: 4001 - protein, 10 aa, synthetic construct
  REGION 1..10: note = Description of sequence: HCHGA-TLS from Expermint 1 of Table 10
TLSKPSPMPV

SEQ ID NO: 4002 - protein, 9 aa, synthetic construct
  REGION 1..9: note = Description of sequence: IA2-MVW from Expermint 1 of Table 10
MVWESGCTV

SEQ ID NO: 4003 - protein, 9 aa, synthetic construct
  REGION 1..9: note = Description of sequence: IA2-VIV from Expermint 1 of Table 10
VIVMLTPLV

SEQ ID NO: 4004 - protein, 10 aa, synthetic construct
  REGION 1..10: note = Description of sequence: IA2-SLY from Expermint 1 of Table 10
SLYHVYEVNL

SEQ ID NO: 4005 - protein, 9 aa, synthetic construct
  REGION 1..9: note = Description of sequence: IA2-SLS from Expermint 1 of Table 10
SLSPLQAEL

SEQ ID NO: 4006 - protein, 9 aa, synthetic construct
  REGION 1..9: note = Description of sequence: IA2-SLA from Expermint 1 of Table 10
SLAAGVKLL

SEQ ID NO: 4007 - protein, 9 aa, synthetic construct
  REGION 1..9: note = Description of sequence: IAPP-KLQ from Expermint 1 of Table 10
KLQVFLIVL

SEQ ID NO: 4008 - protein, 9 aa, synthetic construct
  REGION 1..9: note = Description of sequence: IAPP-FLI from Expermint 1 of Table 10
FLIVLSVAL

SEQ ID NO: 4009 - protein, 9 aa, synthetic construct
  REGION 1..9: note = Description of sequence: IGRP-VLF from Expermint 1 of Table 10
VLFGLGFAI

SEQ ID NO: 4010 - protein, 9 aa, synthetic construct
  REGION 1..9: note = Description of sequence: IGRP-RLL from Expermint 1 of Table 10
RLLCALTSL

SEQ ID NO: 4011 - protein, 9 aa, synthetic construct
  REGION 1..9: note = Description of sequence: IGRP-FLW from Expermint 1 of Table 10
FLWSVFMLI

SEQ ID NO: 4012 - protein, 9 aa, synthetic construct
  REGION 1..9: note = Description of sequence: IGRP-FLF from Expermint 1 of Table 10
FLFAVGFYL

SEQ ID NO: 4013 - protein, 9 aa, synthetic construct
  REGION 1..9: note = Description of sequence: INS-HLV from Expermint 1 of Table 10
HLVEALYLV

SEQ ID NO: 4014 - protein, 10 aa, synthetic construct
  REGION 1..10: note = Description of sequence: INS-SHL from Expermint 1 of Table 10
SHLVEALYLV

SEQ ID NO: 4015 - protein, 9 aa, synthetic construct
  REGION 1..9: note = Description of sequence: DRIP-MLY from Expermint 1 of Table 10
MLYQHLLPL

SEQ ID NO: 4016 - protein, 9 aa, synthetic construct
  REGION 1..9: note = Description of sequence: PPI-15-23 from Expermint 1 of Table 10
ALWGPDPAA

SEQ ID NO: 4017 - protein, 10 aa, synthetic construct
  REGION 1..10: note = Description of sequence: PPI-15-24 from Expermint 1 of Table 10
ALWGPDPAAA

SEQ ID NO: 4018 - protein, 9 aa, synthetic construct
  REGION 1..9: note = Description of sequence: PPI-RLL from Expermint 1 of Table 10
RLLPLLALL

SEQ ID NO: 4019 - protein, 9 aa, synthetic construct
  REGION 1..9: note = Description of sequence: PPI-ALWM from Expermint 1 of Table 10
ALWMRLLPL

SEQ ID NO: 4020 - protein, 9 aa, synthetic construct
  REGION 1..9: note = Description of sequence: ZNT8-VAA from Expermint 1 of Table 10
VAANIVLTV

SEQ ID NO: 4021 - protein, 10 aa, synthetic construct
  REGION 1..10: note = Description of sequence: ZNT8-LLI from Expermint 1 of Table 10
LLIDLTSFLL

SEQ ID NO: 4022 - protein, 9 aa, synthetic construct
  REGION 1..9: note = Description of sequence: ZNT8-LLS from Expermint 1 of Table 10
LLSLFSLWL

SEQ ID NO: 4023 - protein, 9 aa, synthetic construct
  REGION 1..9: note = Description of sequence: ZNT8-VVT from Expermint 1 of Table 10
VVTGVLVYL

SEQ ID NO: 4024 - protein, 10 aa, synthetic construct
  REGION 1..10: note = Description of sequence: ZNT8-VMI from Expermint 1 of Table 10
VMIIVSSLAV

SEQ ID NO: 4025 - protein, 10 aa, synthetic construct
  REGION 1..10: note = Description of sequence: ZNT8-ILA from Expermint 1 of Table 10
ILAVDGVLSV

SEQ ID NO: 4026 - protein, 10 aa, synthetic construct
  REGION 1..10: note = Description of sequence: HCV-K1S from Expermint 1 of Table 10
SLVALGINAV

SEQ ID NO: 4027 - protein, 10 aa, synthetic construct
  REGION 1..10: note = Description of sequence: HCV-K1Y from Expermint 1 of Table 10
YLVALGINAV

SEQ ID NO: 4028 - protein, 10 aa, synthetic construct
  REGION 1..10: note = Description of sequence: HCV-K1Y17V from Expermint 1 of Table 10
YLVALGVNAV

SEQ ID NO: 4029 - protein, 10 aa, synthetic construct
  REGION 1..10: note = Description of sequence: HCV-L2I from Expermint 1 of Table 10
KIVALGINAV

SEQ ID NO: 4030 - protein, 10 aa, synthetic construct
  REGION 1..10: note = Description of sequence: HCV-KLV (WT) from Expermint 1 of Table 10
KLVALGINAV

SEQ ID NO: 4031 - protein, 9 aa, synthetic construct
  REGION 1..9: note = Description of sequence: CMV-VLE from Expermint 1 of Table 10
VLEETSVML

SEQ ID NO: 4032 - protein, 9 aa, synthetic construct
  REGION 1..9: note = Description of sequence: CMV-MLN from Expermint 1 of Table 10
MLNIPSINV

SEQ ID NO: 4033 - protein, 9 aa, synthetic construct
  REGION 1..9: note = Description of sequence: CMV-NLV from Expermint 1 of Table 10
NLVPMVATV

SEQ ID NO: 4034 - protein, 9 aa, synthetic construct
  REGION 1..9: note = Description of sequence: EBV-GLC from Expermint 1 of Table 10
GLCTLVAML

SEQ ID NO: 4035 - protein, 9 aa, synthetic construct
  REGION 1..9: note = Description of sequence: EBV-YVL from Expermint 1 of Table 10
YVLDHLIVV

SEQ ID NO: 4036 - protein, 9 aa, synthetic construct
  REGION 1..9: note = Description of sequence: EBV-YLQ from Expermint 1 of Table 10
YLQQNWWTL

SEQ ID NO: 4037 - protein, 9 aa, synthetic construct
  REGION 1..9: note = Description of sequence: EBV-CLG from Expermint 1 of Table 10
CLGGLLTMV

SEQ ID NO: 4038 - protein, 9 aa, synthetic construct
  REGION 1..9: note = Description of sequence: EBV-FLY from Expermint 1 of Table 10
FLYALALLL

SEQ ID NO: 4039 - protein, 10 aa, synthetic construct
  REGION 1..10: note = Description of sequence: HCV-FLP from Expermint 1 of Table 10
FLPSDFFPSV

SEQ ID NO: 4040 - protein, 9 aa, synthetic construct
  REGION 1..9: note = Description of sequence: HBV-WLS from Expermint 1 of Table 10
WLSLLVPFV

SEQ ID NO: 4041 - protein, 10 aa, synthetic construct
  REGION 1..10: note = Description of sequence: HCV-YLL from Expermint 1 of Table 10
YLLPRRGPRL

SEQ ID NO: 4042 - protein, 9 aa, synthetic construct
  REGION 1..9: note = Description of sequence: HCV-CIN from Expermint 1 of Table 10
CINGVCWTV

SEQ ID NO: 4043 - protein, 10 aa, synthetic construct
  REGION 1..10: note = Description of sequence: HCV-LLF from Expermint 1 of Table 10
LLFNILGGWV

SEQ ID NO: 4044 - protein, 9 aa, synthetic construct
  REGION 1..9: note = Description of sequence: HIV-ILK from Expermint 1 of Table 10
ILKEPVHGV

SEQ ID NO: 4045 - protein, 9 aa, synthetic construct
  REGION 1..9: note = Description of sequence: HIV-SLY from Expermint 1 of Table 10
SLYNTVATL

SEQ ID NO: 4046 - protein, 10 aa, synthetic construct
  REGION 1..10: note = Description of sequence: HPV-YML from Expermint 1 of Table 10
YMLDLQPETT

SEQ ID NO: 4047 - protein, 9 aa, synthetic construct
  REGION 1..9: note = Description of sequence: HSV-SLP from Expermint 1 of Table 10
SLPITVYYA

SEQ ID NO: 4048 - protein, 9 aa, synthetic construct
  REGION 1..9: note = Description of sequence: HTLV-GLL from Expermint 1 of Table 10
GLLSLEEEL

SEQ ID NO: 4049 - protein, 9 aa, synthetic construct
  REGION 1..9: note = Description of sequence: HTLV-LLF from Expermint 1 of Table 10
LLFGYPVYV

SEQ ID NO: 4050 - protein, 9 aa, synthetic construct
  REGION 1..9: note = Description of sequence: IV-AIM from Expermint 1 of Table 10
AIMDKNIIL

SEQ ID NO: 4051 - protein, 9 aa, synthetic construct
  REGION 1..9: note = Description of sequence: IV-GIL from Expermint 1 of Table 10
GILGFVFTL

SEQ ID NO: 4052 - protein, 9 aa, synthetic construct
  REGION 1..9: note = Description of sequence: IVPA-FMY from Expermint 1 of Table 10
FMYSDFHFI

SEQ ID NO: 4053 - protein, 10 aa, synthetic construct
  REGION 1..10: note = Description of sequence: MEA-SMY from Expermint 1 of Table 10
SMYRVFEVGV

SEQ ID NO: 4054 - protein, 10 aa, synthetic construct
  REGION 1..10: note = Description of sequence: MEA-ILP from Expermint 1 of Table 10
ILPGQDLQYV

SEQ ID NO: 4055 - protein, 9 aa, synthetic construct
  REGION 1..9: note = Description of sequence: YFV-LLW from Expermint 1 of Table 10
LLWNGPMAV

SEQ ID NO: 4056 - protein, 10 aa, synthetic construct
  REGION 1..10: note = Description of sequence: ALADH-VLM from Expermint 1 of Table 10
VLMGGVPGVE

SEQ ID NO: 4057 - protein, 9 aa, synthetic construct
  REGION 1..9: note = Description of sequence: GLNS-GLL from Expermint 1 of Table 10
GLLHHAPSL

SEQ ID NO: 4058 - protein, 9 aa, synthetic construct
  REGION 1..9: note = Description of sequence: SODA-DMW from Expermint 1 of Table 10
DMWEHAFYL

SEQ ID NO: 4059 - skipped

SEQ ID NO: 4060 - protein, 9 aa, synthetic construct
  REGION 1..9: note = Description of sequence: NYESO1-V165 from Experiment 2 of Table 10
SLLMWITQV

SEQ ID NO: 4061 - protein, 9 aa, synthetic construct
  REGION 1..9: note = Description of sequence: ADI-SVA from Experiment 2 of Table 10
SVASTITGV

SEQ ID NO: 4062 - protein, 9 aa, synthetic construct
  REGION 1..9: note = Description of sequence: BRA-AG from Experiment 2 of Table 10
WLLPGTSTV

SEQ ID NO: 4063 - protein, 9 aa, synthetic construct
  REGION 1..9: note = Description of sequence: BRA-NA from Experiment 2 of Table 10
WLLPGTSTL

SEQ ID NO: 4064 - protein, 9 aa, synthetic construct
  REGION 1..9: note = Description of sequence: CD1-LLG from Experiment 2 of Table 10
LLGATCMFV

SEQ ID NO: 4065 - protein, 9 aa, synthetic construct
  REGION 1..9: note = Description of sequence: GP100-IMD from Experiment 2 of Table 10
IMDQVPFSV

SEQ ID NO: 4066 - protein, 10 aa, synthetic construct
  REGION 1..10: note = Description of sequence: GP100-AML from Experiment 2 of Table 10
AMLGTHTMEV

SEQ ID NO: 4067 - protein, 9 aa, synthetic construct
  REGION 1..9: note = Description of sequence: GP100-ITD from Experiment 2 of Table 10
ITDQVPFSV

SEQ ID NO: 4068 - protein, 9 aa, synthetic construct
  REGION 1..9: note = Description of sequence: GP100-KTW from Experiment 2 of Table 10
KTWGQYWQV

SEQ ID NO: 4069 - protein, 9 aa, synthetic construct
  REGION 1..9: note = Description of sequence: GP100-YLE from Experiment 2 of Table 10
YLEPGPVTA

SEQ ID NO: 4070 - protein, 9 aa, synthetic construct
  REGION 1..9: note = Description of sequence: GPC-FVG from Experiment 2 of Table 10
FVGEFFTDV

SEQ ID NO: 4071 - protein, 9 aa, synthetic construct
  REGION 1..9: note = Description of sequence: HAFP-FMN from Experiment 2 of Table 10
FMNKFIYEI

SEQ ID NO: 4072 - protein, 10 aa, synthetic construct
  REGION 1..10: note = Description of sequence: HAFP-GLS from Experiment 2 of Table 10
GLSPNLNRFL

SEQ ID NO: 4073 - protein, 9 aa, synthetic construct
  REGION 1..9: note = Description of sequence: MAGEA10-GLY from Experiment 2 of Table 10
GLYDGMEHL

SEQ ID NO: 4074 - protein, 10 aa, synthetic construct
  REGION 1..10: note = Description of sequence: MAGEC2-LLF from Experiment 2 of Table 10
LLFGLALIEV

SEQ ID NO: 4075 - protein, 10 aa, synthetic construct
  REGION 1..10: note = Description of sequence: MART1-A2L from Experiment 2 of Table 10
ELAGIGILTV

SEQ ID NO: 4076 - protein, 9 aa, synthetic construct
  REGION 1..9: note = Description of sequence: MART1-ALM from Experiment 2 of Table 10
ALMDKSLHV

SEQ ID NO: 4077 - protein, 9 aa, synthetic construct
  REGION 1..9: note = Description of sequence: MG50-CMH from Experiment 2 of Table 10
CMHLLLEAV

SEQ ID NO: 4078 - protein, 9 aa, synthetic construct
  REGION 1..9: note = Description of sequence: NYESO1-9A from Experiment 2 of Table 10
SLLMWITQA

SEQ ID NO: 4079 - protein, 9 aa, synthetic construct
  REGION 1..9: note = Description of sequence: TYR-YMD from Experiment 2 of Table 10
YMDGTMSQV

SEQ ID NO: 4080 - protein, 10 aa, synthetic construct
  REGION 1..10: note = Description of sequence: TYR-CLL from Experiment 2 of Table 10
CLLWSFQTSA

SEQ ID NO: 4081 - protein, 9 aa, synthetic construct
  REGION 1..9: note = Description of sequence: WT1-RMF from Experiment 2 of Table 10
RMFPNAPYL

SEQ ID NO: 4082 - protein, 9 aa, synthetic construct
  REGION 1..9: note = Description of sequence: AGL-GLI from Experiment 2 of Table 10
QLIPCMDVV

SEQ ID NO: 4083 - protein, 9 aa, synthetic construct
  REGION 1..9: note = Description of sequence: EF2-ILT from Experiment 2 of Table 10
ILTDITKGV

SEQ ID NO: 4084 - protein, 9 aa, synthetic construct
  REGION 1..9: note = Description of sequence: FBA-ALS from Experiment 2 of Table 10
ALSDHHIYL

SEQ ID NO: 4085 - protein, 9 aa, synthetic construct
  REGION 1..9: note = Description of sequence: HA-VLH from Experiment 2 of Table 10
VLHDDLLEA

SEQ ID NO: 4086 - protein, 9 aa, synthetic construct
  REGION 1..9: note = Description of sequence: KER-ALL from Experiment 2 of Table 10
ALLNIKVKL

SEQ ID NO: 4087 - protein, 9 aa, synthetic construct
  REGION 1..9: note = Description of sequence: L19-ILM from Experiment 2 of Table 10
ILMEHIHKL

SEQ ID NO: 4088 - protein, 9 aa, synthetic construct
  REGION 1..9: note = Description of sequence: PD5-KLS from Experiment 2 of Table 10
KLSEGDLLA

SEQ ID NO: 4089 - protein, 9 aa, synthetic construct
  REGION 1..9: note = Description of sequence: PP1-SII from Experiment 2 of Table 10
SIIGRLLEV

SEQ ID NO: 4090 - protein, 9 aa, synthetic construct
  REGION 1..9: note = Description of sequence: DDX5-YLL from Experiment 2 of Table 10
YLLPAIVHI

SEQ ID NO: 4091 - protein, 9 aa, synthetic construct
  REGION 1..9: note = Description of sequence: SMCY-FID from Experiment 2 of Table 10
FIDSYICQV

SEQ ID NO: 4092 - protein, 9 aa, synthetic construct
  REGION 1..9: note = Description of sequence: SNPG-IML from Experiment 2 of Table 10
IMLEALERV

SEQ ID NO: 4093 - protein, 10 aa, synthetic construct
  REGION 1..10: note = Description of sequence: GAD-RMM from Experiment 2 of Table 10
RMMEYGTTMV

SEQ ID NO: 4094 - protein, 10 aa, synthetic construct
  REGION 1..10: note = Description of sequence: GAD65-VMN from Experiment 2 of Table 10
VMNILLQYVV

SEQ ID NO: 4095 - protein, 10 aa, synthetic construct
  REGION 1..10: note = Description of sequence: GFAP-NLA from Experiment 2 of Table 10
NLAQTDLATV

SEQ ID NO: 4096 - protein, 10 aa, synthetic construct
  REGION 1..10: note = Description of sequence: HCHGA-LLC from Experiment 2 of Table 10
LLCAGQVTAL

SEQ ID NO: 4097 - protein, 10 aa, synthetic construct
  REGION 1..10: note = Description of sequence: HCHGA-TLS from Experiment 2 of Table 10
TLSKPSPMPV

SEQ ID NO: 4098 - protein, 9 aa, synthetic construct
  REGION 1..9: note = Description of sequence: IA2-MVW from Experiment 2 of Table 10
MVWESGCTV

SEQ ID NO: 4099 - protein, 9 aa, synthetic construct
  REGION 1..9: note = Description of sequence: IA2-VIV from Experiment 2 of Table 10
VIVMLTPLV

SEQ ID NO: 4100 - protein, 10 aa, synthetic construct
  REGION 1..10: note = Description of sequence: IA2-SLY from Experiment 2 of Table 10
SLYHVYEVNL

SEQ ID NO: 4101 - protein, 9 aa, synthetic construct
  REGION 1..9: note = Description of sequence: IA2-SLS from Experiment 2 of Table 10
SLSPLQAEL

SEQ ID NO: 4102 - protein, 9 aa, synthetic construct
  REGION 1..9: note = Description of sequence: IA2-SLA from Experiment 2 of Table 10
SLAAGVKLL

SEQ ID NO: 4103 - protein, 9 aa, synthetic construct
  REGION 1..9: note = Description of sequence: IAPP-KLQ from Experiment 2 of Table 10
KLQVFLIVL

SEQ ID NO: 4104 - protein, 9 aa, synthetic construct
  REGION 1..9: note = Description of sequence: IAPP-FLI from Experiment 2 of Table 10
FLIVLSVAL

SEQ ID NO: 4105 - protein, 9 aa, synthetic construct
  REGION 1..9: note = Description of sequence: IGRP-VLF from Experiment 2 of Table 10
VLFGLGFAI

SEQ ID NO: 4106 - protein, 9 aa, synthetic construct
  REGION 1..9: note = Description of sequence: IGRP-RLL from Experiment 2 of Table 10
RLLCALTSL

SEQ ID NO: 4107 - protein, 9 aa, synthetic construct
  REGION 1..9: note = Description of sequence: IGRP-FLW from Experiment 2 of Table 10
FLWSVFMLI

SEQ ID NO: 4108 - protein, 9 aa, synthetic construct
  REGION 1..9: note = Description of sequence: IGRP-FLF from Experiment 2 of Table 10
FLFAVGFYL

SEQ ID NO: 4109 - protein, 9 aa, synthetic construct
  REGION 1..9: note = Description of sequence: INS-HLV from Experiment 2 of Table 10
HLVEALYLV

SEQ ID NO: 4110 - protein, 10 aa, synthetic construct
  REGION 1..10: note = Description of sequence: INS-SHL from Experiment 2 of Table 10
SHLVEALYLV

SEQ ID NO: 4111 - protein, 9 aa, synthetic construct
  REGION 1..9: note = Description of sequence: DRIP-MLY from Experiment 2 of Table 10
MLYQHLLPL

SEQ ID NO: 4112 - protein, 9 aa, synthetic construct
  REGION 1..9: note = Description of sequence: PPI-15-23 from Experiment 2 of Table 10
ALWGPDPAA

SEQ ID NO: 4113 - protein, 10 aa, synthetic construct
  REGION 1..10: note = Description of sequence: PPI-15-24 from Experiment 2 of Table 10
ALWGPDPAAA

SEQ ID NO: 4114 - protein, 9 aa, synthetic construct
  REGION 1..9: note = Description of sequence: PPI-RLL from Experiment 2 of Table 10
RLLPLLALL

SEQ ID NO: 4115 - protein, 9 aa, synthetic construct
  REGION 1..9: note = Description of sequence: PPI-ALWM from Experiment 2 of Table 10
ALWMRLLPL

SEQ ID NO: 4116 - protein, 9 aa, synthetic construct
  REGION 1..9: note = Description of sequence: ZNT8-VAA from Experiment 2 of Table 10
VAANIVLTV

SEQ ID NO: 4117 - protein, 10 aa, synthetic construct
  REGION 1..10: note = Description of sequence: ZNT8-LLI from Experiment 2 of Table 10
LLIDLTSFLL

SEQ ID NO: 4118 - protein, 9 aa, synthetic construct
  REGION 1..9: note = Description of sequence: ZNT8-LLS from Experiment 2 of Table 10
LLSLFSLWL

SEQ ID NO: 4119 - protein, 9 aa, synthetic construct
  REGION 1..9: note = Description of sequence: ZNT8-VVT from Experiment 2 of Table 10
VVTGVLVYL

SEQ ID NO: 4120 - protein, 10 aa, synthetic construct
  REGION 1..10: note = Description of sequence: ZNT8-VMI from Experiment 2 of Table 10
VMIIVSSLAV

SEQ ID NO: 4121 - protein, 10 aa, synthetic construct
  REGION 1..10: note = Description of sequence: ZNT8-ILA from Experiment 2 of Table 10
ILAVDGVLSV

SEQ ID NO: 4122 - protein, 10 aa, synthetic construct
  REGION 1..10: note = Description of sequence: HCV-K1S from Experiment 2 of Table 10
SLVALGINAV

SEQ ID NO: 4123 - protein, 10 aa, synthetic construct
  REGION 1..10: note = Description of sequence: HCV-K1Y from Experiment 2 of Table 10
YLVALGINAV

SEQ ID NO: 4124 - protein, 10 aa, synthetic construct
  REGION 1..10: note = Description of sequence: HCV-K1Y17V from Experiment 2 of Table 10
YLVALGVNAV

SEQ ID NO: 4125 - protein, 10 aa, synthetic construct
  REGION 1..10: note = Description of sequence: HCV-L2I from Experiment 2 of Table 10
KIVALGINAV

SEQ ID NO: 4126 - protein, 10 aa, synthetic construct
  REGION 1..10: note = Description of sequence: HCV-KLV (WT) from Experiment 2 of Table 10
KLVALGINAV

SEQ ID NO: 4127 - protein, 9 aa, synthetic construct
  REGION 1..9: note = Description of sequence: CMV-VLE from Experiment 2 of Table 10
VLEETSVML

SEQ ID NO: 4128 - protein, 9 aa, synthetic construct
  REGION 1..9: note = Description of sequence: CMV-MLN from Experiment 2 of Table 10
MLNIPSINV

SEQ ID NO: 4129 - protein, 9 aa, synthetic construct
  REGION 1..9: note = Description of sequence: CMV-NLV from Experiment 2 of Table 10
NLVPMVATV

SEQ ID NO: 4130 - protein, 9 aa, synthetic construct
  REGION 1..9: note = Description of sequence: EBV-GLC from Experiment 2 of Table 10
GLCTLVAML

SEQ ID NO: 4131 - protein, 9 aa, synthetic construct
  REGION 1..9: note = Description of sequence: EBV-YVL from Experiment 2 of Table 10
YVLDHLIVV

SEQ ID NO: 4132 - protein, 9 aa, synthetic construct
  REGION 1..9: note = Description of sequence: EBV-YLQ from Experiment 2 of Table 10
YLQQNWWTL

SEQ ID NO: 4133 - protein, 9 aa, synthetic construct
  REGION 1..9: note = Description of sequence: EBV-CLG from Experiment 2 of Table 10
CLGGLLTMV

SEQ ID NO: 4134 - protein, 9 aa, synthetic construct
  REGION 1..9: note = Description of sequence: EBV-FLY from Experiment 2 of Table 10
FLYALALLL

SEQ ID NO: 4135 - protein, 10 aa, synthetic construct
  REGION 1..10: note = Description of sequence: HCV-FLP from Experiment 2 of Table 10
FLPSDFFPSV

SEQ ID NO: 4136 - protein, 9 aa, synthetic construct
  REGION 1..9: note = Description of sequence: HBV-WLS from Experiment 2 of Table 10
WLSLLVPFV

SEQ ID NO: 4137 - protein, 10 aa, synthetic construct
  REGION 1..10: note = Description of sequence: HCV-YLL from Experiment 2 of Table 10
YLLPRRGPRL

SEQ ID NO: 4138 - protein, 9 aa, synthetic construct
  REGION 1..9: note = Description of sequence: HCV-CIN from Experiment 2 of Table 10
CINGVCWTV

SEQ ID NO: 4139 - protein, 10 aa, synthetic construct
  REGION 1..10: note = Description of sequence: HCV-LLF from Experiment 2 of Table 10
LLFNILGGWV

SEQ ID NO: 4140 - protein, 9 aa, synthetic construct
  REGION 1..9: note = Description of sequence: HIV-ILK from Experiment 2 of Table 10
ILKEPVHGV

SEQ ID NO: 4141 - protein, 9 aa, synthetic construct
  REGION 1..9: note = Description of sequence: HIV-SLY from Experiment 2 of Table 10
SLYNTVATL

SEQ ID NO: 4142 - protein, 10 aa, synthetic construct
  REGION 1..10: note = Description of sequence: HPV-YML from Experiment 2 of Table 10
YMLDLQPETT

SEQ ID NO: 4143 - protein, 9 aa, synthetic construct
  REGION 1..9: note = Description of sequence: HSV-SLP from Experiment 2 of Table 10
SLPITVYYA

SEQ ID NO: 4144 - protein, 9 aa, synthetic construct
  REGION 1..9: note = Description of sequence: HTLV-GLL from Experiment 2 of Table 10
GLLSLEEEL

SEQ ID NO: 4145 - protein, 9 aa, synthetic construct
  REGION 1..9: note = Description of sequence: HTLV-LLF from Experiment 2 of Table 10
LLFGYPVYV

SEQ ID NO: 4146 - protein, 9 aa, synthetic construct
  REGION 1..9: note = Description of sequence: IV-AIM from Experiment 2 of Table 10
AIMDKNIIL

SEQ ID NO: 4147 - protein, 9 aa, synthetic construct
  REGION 1..9: note = Description of sequence: IV-GIL from Experiment 2 of Table 10
GILGFVFTL

SEQ ID NO: 4148 - protein, 9 aa, synthetic construct
  REGION 1..9: note = Description of sequence: IVPA-FMY from Experiment 2 of Table 10
FMYSDFHFI

SEQ ID NO: 4149 - protein, 10 aa, synthetic construct
  REGION 1..10: note = Description of sequence: MEA-SMY from Experiment 2 of Table 10
SMYRVFEVGV

SEQ ID NO: 4150 - protein, 10 aa, synthetic construct
  REGION 1..10: note = Description of sequence: MEA-ILP from Experiment 2 of Table 10
ILPGQDLQYV

SEQ ID NO: 4151 - protein, 9 aa, synthetic construct
  REGION 1..9: note = Description of sequence: YFV-LLW from Experiment 2 of Table 10
LLWNGPMAV

SEQ ID NO: 4152 - protein, 10 aa, synthetic construct
  REGION 1..10: note = Description of sequence: ALADH-VLM from Experiment 2 of Table 10
VLMGGVPGVE

SEQ ID NO: 4153 - protein, 9 aa, synthetic construct
  REGION 1..9: note = Description of sequence: GLNS-GLL from Experiment 2 of Table 10
GLLHHAPSL

SEQ ID NO: 4154 - protein, 9 aa, synthetic construct
  REGION 1..9: note = Description of sequence: SODA-DMW from Experiment 2 of Table 10
DMWEHAFYL

SEQ ID NO: 4155 - protein, 10 aa, synthetic construct
  REGION 1..10: note = Description of sequence: HCV-A9N from Experiment 2 of Table 10
KLVALGINNV

SEQ ID NO: 4156 - protein, 9 aa, synthetic construct
  REGION 1..9: note = Description of sequence: WDR46 from Experiment 3 of Table 10
FLTYLDVSV

SEQ ID NO: 4157 - protein, 9 aa, synthetic construct
  REGION 1..9: note = Description of sequence: AHNAK from Experiment 3 of Table 10
SMPDFDLHL

SEQ ID NO: 4158 - protein, 10 aa, synthetic construct
  REGION 1..10: note = Description of sequence: COL18A1 from Experiment 3 of Table 10
VLLGVKLSGV

SEQ ID NO: 4159 - protein, 9 aa, synthetic construct
  REGION 1..9: note = Description of sequence: ERBB2 from Experiment 3 of Table 10
ALIHHNTHL

SEQ ID NO: 4160 - protein, 10 aa, synthetic construct
  REGION 1..10: note = Description of sequence: TEAD1 (VLE) from Experiment 3 of Table 10
VLENFTILLV

SEQ ID NO: 4161 - protein, 10 aa, synthetic construct
  REGION 1..10: note = Description of sequence: TEAD1 (SVL) from Experiment 3 of Table 10
SVLENFTILL

SEQ ID NO: 4162 - protein, 9 aa, synthetic construct
  REGION 1..9: note = Description of sequence: NSDHL from Experiment 3 of Table 10
ILTGLNYEA

SEQ ID NO: 4163 - protein, 9 aa, synthetic construct
  REGION 1..9: note = Description of sequence: GANAB from Experiment 3 of Table 10
ALYGSVPVL

SEQ ID NO: 4164 - protein, 9 aa, synthetic construct
  REGION 1..9: note = Description of sequence: FNDC3B from Experiment 3 of Table 10
VVLSWAPPV

SEQ ID NO: 4165 - protein, 10 aa, synthetic construct
  REGION 1..10: note = Description of sequence: GCN1L1 from Experiment 3 of Table 10
ALLETLSLLL

SEQ ID NO: 4166 - protein, 9 aa, synthetic construct
  REGION 1..9: note = Description of sequence: MLL2 from Experiment 3 of Table 10
ALSPVIPLI

SEQ ID NO: 4167 - protein, 10 aa, synthetic construct
  REGION 1..10: note = Description of sequence: SMARCD3 from Experiment 3 of Table 10
KLFEFLVHGV

SEQ ID NO: 4168 - protein, 9 aa, synthetic construct
  REGION 1..9: note = Description of sequence: GNL3L from Experiment 3 of Table 10
NLNRCSVPV

SEQ ID NO: 4169 - protein, 9 aa, synthetic construct
  REGION 1..9: note = Description of sequence: USP28 from Experiment 3 of Table 10
LIIPCIHLI

SEQ ID NO: 4170 - protein, 9 aa, synthetic construct
  REGION 1..9: note = Description of sequence: MRM1 from Experiment 3 of Table 10
LLFGMTPCL

SEQ ID NO: 4171 - protein, 9 aa, synthetic construct
  REGION 1..9: note = Description of sequence: SNX24 from Experiment 3 of Table 10
KLSHQPVLL

SEQ ID NO: 4172 - protein, 9 aa, synthetic construct
  REGION 1..9: note = Description of sequence: PGM5 from Experiment 3 of Table 10
AVGSHVYSV

SEQ ID NO: 4173 - protein, 9 aa, synthetic construct
  REGION 1..9: note = Description of sequence: SEC24A from Experiment 3 of Table 10
FLYNPLTRV

SEQ ID NO: 4174 - protein, 9 aa, synthetic construct
  REGION 1..9: note = Description of sequence: AKAP13 from Experiment 3 of Table 10
KLMNIQQQL

SEQ ID NO: 4175 - protein, 9 aa, synthetic construct
  REGION 1..9: note = Description of sequence: PABPC1 from Experiment 3 of Table 10
MLGERLFPL

SEQ ID NO: 4176 - protein, 9 aa, synthetic construct
  REGION 1..9: note = Description of sequence: WDR46 T3I from Experiment 3 of Table 10
FLIYLDVSV

SEQ ID NO: 4177 - protein, 9 aa, synthetic construct
  REGION 1..9: note = Description of sequence: AHNAK S1F from Experiment 3 of Table 10
FMPDFDLHL

SEQ ID NO: 4178 - protein, 10 aa, synthetic construct
  REGION 1..10: note = Description of sequence: COL18A1 S8F from Experiment 3 of Table 10
VLLGVKLFGV

SEQ ID NO: 4179 - protein, 9 aa, synthetic construct
  REGION 1..9: note = Description of sequence: ERBB2 H8Y from Experiment 3 of Table 10
ALIHHNTYL

SEQ ID NO: 4180 - protein, 10 aa, synthetic construct
  REGION 1..10: note = Description of sequence: TEAD1 L8F from Experiment 3 of Table 10
VLENFTIFLV

SEQ ID NO: 4181 - protein, 10 aa, synthetic construct
  REGION 1..10: note = Description of sequence: TEAD1 L9F from Experiment 3 of Table 10
SVLENFTIFL

SEQ ID NO: 4182 - protein, 9 aa, synthetic construct
  REGION 1..9: note = Description of sequence: NSDHL A9V from Experiment 3 of Table 10
ILTGLNYEV

SEQ ID NO: 4183 - protein, 9 aa, synthetic construct
  REGION 1..9: note = Description of sequence: GANAB S5F from Experiment 3 of Table 10
ALYGFVPVL

SEQ ID NO: 4184 - protein, 9 aa, synthetic construct
  REGION 1..9: note = Description of sequence: FNDC3B L3M from Experiment 3 of Table 10
VVMSWAPPV

SEQ ID NO: 4185 - protein, 10 aa, synthetic construct
  REGION 1..10: note = Description of sequence: GCN1L1 L6P from Experiment 3 of Table 10
ALLETPSLLL

SEQ ID NO: 4186 - protein, 9 aa, synthetic construct
  REGION 1..9: note = Description of sequence: MLL2 L8H from Experiment 3 of Table 10
ALSPVIPHI

SEQ ID NO: 4187 - protein, 10 aa, synthetic construct
  REGION 1..10: note = Description of sequence: SMARCD3 H8Y from Experiment 3 of Table 10
KLFEFLVYGV

SEQ ID NO: 4188 - protein, 9 aa, synthetic construct
  REGION 1..9: note = Description of sequence: GNL3L R4C from Experiment 3 of Table 10
NLNCCSVPV

SEQ ID NO: 4189 - protein, 9 aa, synthetic construct
  REGION 1..9: note = Description of sequence: USP28 C5F from Experiment 3 of Table 10
LIIPFIHLI

SEQ ID NO: 4190 - protein, 9 aa, synthetic construct
  REGION 1..9: note = Description of sequence: MRM1 T6P from Experiment 3 of Table 10
LLFGMPPCL

SEQ ID NO: 4191 - protein, 9 aa, synthetic construct
  REGION 1..9: note = Description of sequence: SNX24 P6L from Experiment 3 of Table 10
KLSHQLVLL

SEQ ID NO: 4192 - protein, 9 aa, synthetic construct
  REGION 1..9: note = Description of sequence: PGM5 H5Y from Experiment 3 of Table 10
AVGSYVYSV

SEQ ID NO: 4193 - protein, 9 aa, synthetic construct
  REGION 1..9: note = Description of sequence: SEC24A P5L from Experiment 3 of Table 10
FLYNLLTRV

SEQ ID NO: 4194 - protein, 9 aa, synthetic construct
  REGION 1..9: note = Description of sequence: AKAP13 Q8K from Experiment 3 of Table 10
KLMNIQQKL

SEQ ID NO: 4195 - protein, 9 aa, synthetic construct
  REGION 1..9: note = Description of sequence: PABPC1 R5Q from Experiment 3 of Table 10
MLGEQLFPL

SEQ ID NO: 4196 - protein, 10 aa, synthetic construct
  REGION 1..10: note = Description of sequence: HCV-KLV (WT) from Experiment 3 of Table 10
KLVALGINAV

SEQ ID NO: 4197 - protein, 10 aa, synthetic construct
  REGION 1..10: note = Description of sequence: HCV-KLV (WT) from Experiment 3 of Table 10
KLVALGINAV

SEQ ID NO: 4198-4199 - skipped (2 entries)

SEQ ID NO: 4200 - protein, 9 aa, synthetic construct
  REGION 1..9: note = Description of sequence: WDR46 from Experiment 4 of Table 10
FLTYLDVSV

SEQ ID NO: 4201 - protein, 9 aa, synthetic construct
  REGION 1..9: note = Description of sequence: AHNAK from Experiment 4 of Table 10
SMPDFDLHL

SEQ ID NO: 4202 - protein, 10 aa, synthetic construct
  REGION 1..10: note = Description of sequence: COL18A1 from Experiment 4 of Table 10
VLLGVKLSGV

SEQ ID NO: 4203 - protein, 9 aa, synthetic construct
  REGION 1..9: note = Description of sequence: ERBB2 from Experiment 4 of Table 10
ALIHHNTHL

SEQ ID NO: 4204 - protein, 10 aa, synthetic construct
  REGION 1..10: note = Description of sequence: TEAD1 (VLE) from Experiment 4 of Table 10
VLENFTILLV

SEQ ID NO: 4205 - protein, 10 aa, synthetic construct
  REGION 1..10: note = Description of sequence: TEAD1 (SVL) from Experiment 4 of Table 10
SVLENFTILL

SEQ ID NO: 4206 - protein, 9 aa, synthetic construct
  REGION 1..9: note = Description of sequence: NSDHL from Experiment 4 of Table 10
ILTGLNYEA

SEQ ID NO: 4207 - protein, 9 aa, synthetic construct
  REGION 1..9: note = Description of sequence: GANAB from Experiment 4 of Table 10
ALYGSVPVL

SEQ ID NO: 4208 - protein, 9 aa, synthetic construct
  REGION 1..9: note = Description of sequence: FNDC3B from Experiment 4 of Table 10
VVLSWAPPV

SEQ ID NO: 4209 - protein, 10 aa, synthetic construct
  REGION 1..10: note = Description of sequence: GCN1L1 from Experiment 4 of Table 10
ALLETLSLLL

SEQ ID NO: 4210 - protein, 9 aa, synthetic construct
  REGION 1..9: note = Description of sequence: MLL2 from Experiment 4 of Table 10
ALSPVIPLI

SEQ ID NO: 4211 - protein, 10 aa, synthetic construct
  REGION 1..10: note = Description of sequence: SMARCD3 from Experiment 4 of Table 10
KLFEFLVHGV

SEQ ID NO: 4212 - protein, 9 aa, synthetic construct
  REGION 1..9: note = Description of sequence: GNL3L from Experiment 4 of Table 10
NLNRCSVPV

SEQ ID NO: 4213 - protein, 9 aa, synthetic construct
  REGION 1..9: note = Description of sequence: USP28 from Experiment 4 of Table 10
LIIPCIHLI

SEQ ID NO: 4214 - protein, 9 aa, synthetic construct
  REGION 1..9: note = Description of sequence: MRM1 from Experiment 4 of Table 10
LLFGMTPCL

SEQ ID NO: 4215 - protein, 9 aa, synthetic construct
  REGION 1..9: note = Description of sequence: SNX24 from Experiment 4 of Table 10
KLSHQPVLL

SEQ ID NO: 4216 - protein, 9 aa, synthetic construct
  REGION 1..9: note = Description of sequence: PGM5 from Experiment 4 of Table 10
AVGSHVYSV

SEQ ID NO: 4217 - protein, 9 aa, synthetic construct
  REGION 1..9: note = Description of sequence: SEC24A from Experiment 4 of Table 10
FLYNPLTRV

SEQ ID NO: 4218 - protein, 9 aa, synthetic construct
  REGION 1..9: note = Description of sequence: AKAP13 from Experiment 4 of Table 10
KLMNIQQQL

SEQ ID NO: 4219 - protein, 9 aa, synthetic construct
  REGION 1..9: note = Description of sequence: PABPC1 from Experiment 4 of Table 10
MLGERLFPL

SEQ ID NO: 4220 - protein, 9 aa, synthetic construct
  REGION 1..9: note = Description of sequence: WDR46 T3I from Experiment 4 of Table 10
FLIYLDVSV

SEQ ID NO: 4221 - protein, 9 aa, synthetic construct
  REGION 1..9: note = Description of sequence: AHNAK S1F from Experiment 4 of Table 10
FMPDFDLHL

SEQ ID NO: 4222 - protein, 10 aa, synthetic construct
  REGION 1..10: note = Description of sequence: COL18A1 S8F from Experiment 4 of Table 10
VLLGVKLFGV

SEQ ID NO: 4223 - protein, 9 aa, synthetic construct
  REGION 1..9: note = Description of sequence: ERBB2 H8Y from Experiment 4 of Table 10
ALIHHNTYL

SEQ ID NO: 4224 - protein, 10 aa, synthetic construct
  REGION 1..10: note = Description of sequence: TEAD1 L8F from Experiment 4 of Table 10
VLENFTIFLV

SEQ ID NO: 4225 - protein, 10 aa, synthetic construct
  REGION 1..10: note = Description of sequence: TEAD1 L9F from Experiment 4 of Table 10
SVLENFTIFL

SEQ ID NO: 4226 - protein, 9 aa, synthetic construct
  REGION 1..9: note = Description of sequence: NSDHL A9V from Experiment 4 of Table 10
ILTGLNYEV

SEQ ID NO: 4227 - protein, 9 aa, synthetic construct
  REGION 1..9: note = Description of sequence: GANAB S5F from Experiment 4 of Table 10
ALYGFVPVL

SEQ ID NO: 4228 - protein, 9 aa, synthetic construct
  REGION 1..9: note = Description of sequence: FNDC3B L3M from Experiment 4 of Table 10
VVMSWAPPV

SEQ ID NO: 4229 - protein, 10 aa, synthetic construct
  REGION 1..10: note = Description of sequence: GCN1L1 L6P from Experiment 4 of Table 10
ALLETPSLLL

SEQ ID NO: 4230 - protein, 9 aa, synthetic construct
  REGION 1..9: note = Description of sequence: MLL2 L8H from Experiment 4 of Table 10
ALSPVIPHI

SEQ ID NO: 4231 - protein, 10 aa, synthetic construct
  REGION 1..10: note = Description of sequence: SMARCD3 H8Y from Experiment 4 of Table 10
KLFEFLVYGV

SEQ ID NO: 4232 - protein, 9 aa, synthetic construct
  REGION 1..9: note = Description of sequence: GNL3L R4C from Experiment 4 of Table 10
NLNCCSVPV

SEQ ID NO: 4233 - protein, 9 aa, synthetic construct
  REGION 1..9: note = Description of sequence: USP28 C5F from Experiment 4 of Table 10
LIIPFIHLI

SEQ ID NO: 4234 - protein, 9 aa, synthetic construct
  REGION 1..9: note = Description of sequence: MRM1 T6P from Experiment 4 of Table 10
LLFGMPPCL

SEQ ID NO: 4235 - protein, 9 aa, synthetic construct
  REGION 1..9: note = Description of sequence: SNX24 P6L from Experiment 4 of Table 10
KLSHQLVLL

SEQ ID NO: 4236 - protein, 9 aa, synthetic construct
  REGION 1..9: note = Description of sequence: PGM5 H5Y from Experiment 4 of Table 10
AVGSYVYSV

SEQ ID NO: 4237 - protein, 9 aa, synthetic construct
  REGION 1..9: note = Description of sequence: SEC24A P5L from Experiment 4 of Table 10
FLYNLLTRV

SEQ ID NO: 4238 - protein, 9 aa, synthetic construct
  REGION 1..9: note = Description of sequence: AKAP13 Q8K from Experiment 4 of Table 10
KLMNIQQKL

SEQ ID NO: 4239 - protein, 9 aa, synthetic construct
  REGION 1..9: note = Description of sequence: PABPC1 R5Q from Experiment 4 of Table 10
MLGEQLFPL

SEQ ID NO: 4240 - protein, 9 aa, synthetic construct
  REGION 1..9: note = Description of sequence: MAGE-A3 112 120 from Experiment 4 of Table 10
KVAELVHFL

SEQ ID NO: 4241 - protein, 9 aa, synthetic construct
  REGION 1..9: note = Description of sequence: MAGE-A12 112-120 from Experiment 4 of Table 10
KMAELVHFL

SEQ ID NO: 4242 - protein, 9 aa, synthetic construct
  REGION 1..9: note = Description of sequence: MAGE-A2 112-120 from Experiment 4 of Table 10
KMVELVHFL

SEQ ID NO: 4243 - protein, 9 aa, synthetic construct
  REGION 1..9: note = Description of sequence: MAGE-A6 112-120 from Experiment 4 of Table 10
KVAKLVHFL

SEQ ID NO: 4244 - protein, 9 aa, synthetic construct
  REGION 1..9: note = Description of sequence: A2ML1-YLD_K7R from Experiment 5 of Table 10
YLDELIRNT

SEQ ID NO: 4245 - protein, 9 aa, synthetic construct
  REGION 1..9: note = Description of sequence: AGFG2-FLQ_S4S from Experiment 5 of Table 10
FLQFRGNEV

SEQ ID NO: 4246 - protein, 9 aa, synthetic construct
  REGION 1..9: note = Description of sequence: AGXT2L2-ILT_M5I from Experiment 5 of Table 10
ILTDIEEKV

SEQ ID NO: 4247 - protein, 9 aa, synthetic construct
  REGION 1..9: note = Description of sequence: AHNAK-SMP_S1F from Experiment 5 of Table 10
FMPDFDLHL

SEQ ID NO: 4248 - protein, 9 aa, synthetic construct
  REGION 1..9: note = Description of sequence: AKAP13-KLM_Q8K from Experiment 5 of Table 10
KLMNIQQKL

SEQ ID NO: 4249 - protein, 9 aa, synthetic construct
  REGION 1..9: note = Description of sequence: APBB2-GML_L3F from Experiment 5 of Table 10
GMFPVDKPV

SEQ ID NO: 4250 - protein, 9 aa, synthetic construct
  REGION 1..9: note = Description of sequence: APBB2-VQY_L7F from Experiment 5 of Table 10
VQYLGMFPV

SEQ ID NO: 4251 - protein, 9 aa, synthetic construct
  REGION 1..9: note = Description of sequence: APCDD1L-RLP_R1W from Experiment 5 of Table 10
WLPHVEYEL

SEQ ID NO: 4252 - protein, 9 aa, synthetic construct
  REGION 1..9: note = Description of sequence: ATP6AP1-KLG_G3W from Experiment 5 of Table 10
KLWASPLHV

SEQ ID NO: 4253 - protein, 9 aa, synthetic construct
  REGION 1..9: note = Description of sequence: BAIAP3-ILN_V6I from Experiment 5 of Table 10
ILNVDIFTL

SEQ ID NO: 4254 - protein, 9 aa, synthetic construct
  REGION 1..9: note = Description of sequence: BCL9L-FVY_T6I from Experiment 5 of Table 10
FVYVFITHL

SEQ ID NO: 4255 - protein, 9 aa, synthetic construct
  REGION 1..9: note = Description of sequence: BTBD1-FML_LI from Experiment 5 of Table 10
FMLLTQARI

SEQ ID NO: 4256 - protein, 10 aa, synthetic construct
  REGION 1..10: note = Description of sequence: C15orf32-MLS_G9R from Experiment 5 of Table 10
MLSILALVRV

SEQ ID NO: 4257 - protein, 9 aa, synthetic construct
  REGION 1..9: note = Description of sequence: C17orf75-ALS_V7A from Experiment 5 of Table 10
ALSYTPAEV

SEQ ID NO: 4258 - protein, 10 aa, synthetic construct
  REGION 1..10: note = Description of sequence: C1S-10_N1H from Experiment 5 of Table 10
HLMDGDLGLI

SEQ ID NO: 4259 - protein, 9 aa, synthetic construct
  REGION 1..9: note = Description of sequence: C1S-9_N1H from Experiment 5 of Table 10
HLMDGDLGL

SEQ ID NO: 4260 - protein, 9 aa, synthetic construct
  REGION 1..9: note = Description of sequence: C3orf58-LMV_L4P from Experiment 5 of Table 10
LMVPHSPSL

SEQ ID NO: 4261 - protein, 9 aa, synthetic construct
  REGION 1..9: note = Description of sequence: CAMK1D-KLF_K8N from Experiment 5 of Table 10
KLFEQILNA

SEQ ID NO: 4262 - protein, 9 aa, synthetic construct
  REGION 1..9: note = Description of sequence: CCM2-YML_R6H from Experiment 5 of Table 10
YMLTLHTKL

SEQ ID NO: 4263 - protein, 9 aa, synthetic construct
  REGION 1..9: note = Description of sequence: CD47-GLT_V6F from Experiment 5 of Table 10
GLTSFFIAI

SEQ ID NO: 4264 - protein, 9 aa, synthetic construct
  REGION 1..9: note = Description of sequence: CDC37L1-FLS_P6L from Experiment 5 of Table 10
FLSDHLYLV

SEQ ID NO: 4265 - protein, 9 aa, synthetic construct
  REGION 1..9: note = Description of sequence: CELSR1-YLF_F3L from Experiment 5 of Table 10
YLLAIFSGL

SEQ ID NO: 4266 - protein, 9 aa, synthetic construct
  REGION 1..9: note = Description of sequence: CHD8-KLN_P7A from Experiment 5 of Table 10
KLNTITAVV

SEQ ID NO: 4267 - protein, 9 aa, synthetic construct
  REGION 1..9: note = Description of sequence: CHST13-VLV_V1M from Experiment 5 of Table 10
MLVDDAHGL

SEQ ID NO: 4268 - protein, 9 aa, synthetic construct
  REGION 1..9: note = Description of sequence: CHST14-MLM_F4L from Experiment 5 of Table 10
MLMLAVIVA

SEQ ID NO: 4269 - protein, 9 aa, synthetic construct
  REGION 1..9: note = Description of sequence: CLCN4-LLA_G8V from Experiment 5 of Table 10
LLAGTLAVV

SEQ ID NO: 4270 - protein, 9 aa, synthetic construct
  REGION 1..9: note = Description of sequence: CNKSR1-SLA_A9V from Experiment 5 of Table 10
SLAPLSPRV

SEQ ID NO: 4271 - protein, 10 aa, synthetic construct
  REGION 1..10: note = Description of sequence: COL18A1-VLL_S8F from Experiment 5 of Table 10
VLLGVKLFGV

SEQ ID NO: 4272 - protein, 9 aa, synthetic construct
  REGION 1..9: note = Description of sequence: DCHS1-TLF_I5M from Experiment 5 of Table 10
TLFTMVGTV

SEQ ID NO: 4273 - protein, 9 aa, synthetic construct
  REGION 1..9: note = Description of sequence: DHX33-LLA_K5T from Experiment 5 of Table 10
LLAMTVPNV

SEQ ID NO: 4274 - protein, 9 aa, synthetic construct
  REGION 1..9: note = Description of sequence: DHX33-LLA_M4I from Experiment 5 of Table 10
LLAIKVPNV

SEQ ID NO: 4275 - protein, 10 aa, synthetic construct
  REGION 1..10: note = Description of sequence: DNAH8-FMT_G7D from Experiment 5 of Table 10
FMTKINDLEV

SEQ ID NO: 4276 - protein, 9 aa, synthetic construct
  REGION 1..9: note = Description of sequence: DOCK7-FLN_M9L from Experiment 5 of Table 10
FLNDLLSVL

SEQ ID NO: 4277 - protein, 9 aa, synthetic construct
  REGION 1..9: note = Description of sequence: DOLPP1-GLM_A4V from Experiment 5 of Table 10
GLMVIAWFI

SEQ ID NO: 4278 - protein, 9 aa, synthetic construct
  REGION 1..9: note = Description of sequence: DRAM1-FII_I3F from Experiment 5 of Table 10
FIFSYVVAV

SEQ ID NO: 4279 - protein, 9 aa, synthetic construct
  REGION 1..9: note = Description of sequence: ERBB2-ALI_H8Y from Experiment 5 of Table 10
ALIHHNTYL

SEQ ID NO: 4280 - protein, 9 aa, synthetic construct
  REGION 1..9: note = Description of sequence: EXOC3L4-ILL_V9I from Experiment 5 of Table 10
ILLDWAANI

SEQ ID NO: 4281 - protein, 9 aa, synthetic construct
  REGION 1..9: note = Description of sequence: FAM47B-ALF_A1S from Experiment 5 of Table 10
SLFSELSPV

SEQ ID NO: 4282 - protein, 9 aa, synthetic construct
  REGION 1..9: note = Description of sequence: FBXL4-SLL_L2V from Experiment 5 of Table 10
SVLEYYTEL

SEQ ID NO: 4283 - protein, 9 aa, synthetic construct
  REGION 1..9: note = Description of sequence: FLNA-HIA_P6L from Experiment 5 of Table 10
HIAKSLFEV

SEQ ID NO: 4284 - protein, 9 aa, synthetic construct
  REGION 1..9: note = Description of sequence: FNDC3B-VVL_L3M from Experiment 5 of Table 10
VVMSWAPPV

SEQ ID NO: 4285 - protein, 9 aa, synthetic construct
  REGION 1..9: note = Description of sequence: GABRG3-TAM_L5I from Experiment 5 of Table 10
TAMDIFVTV

SEQ ID NO: 4286 - protein, 9 aa, synthetic construct
  REGION 1..9: note = Description of sequence: GABRG3-YVT_L7I from Experiment 5 of Table 10
YVTAMDIFV

SEQ ID NO: 4287 - protein, 9 aa, synthetic construct
  REGION 1..9: note = Description of sequence: GALC-YVV_V3L from Experiment 5 of Table 10
YVLTWIVGA

SEQ ID NO: 4288 - protein, 9 aa, synthetic construct
  REGION 1..9: note = Description of sequence: GANAB-ALY_S5F from Experiment 5 of Table 10
ALYGFVPVL

SEQ ID NO: 4289 - protein, 10 aa, synthetic construct
  REGION 1..10: note = Description of sequence: GCN1L1-10_L6P from Experiment 5 of Table 10
ALLETPSLLL

SEQ ID NO: 4290 - protein, 9 aa, synthetic construct
  REGION 1..9: note = Description of sequence: GCN1L1-9_L6P from Experiment 5 of Table 10
ALLETPSLL

SEQ ID NO: 4291 - protein, 9 aa, synthetic construct
  REGION 1..9: note = Description of sequence: GLRA1-LIF_F6L from Experiment 5 of Table 10
LIFNMLYWI

SEQ ID NO: 4292 - protein, 9 aa, synthetic construct
  REGION 1..9: note = Description of sequence: GOLGA3-SLD_P4L from Experiment 5 of Table 10
SLDLTTSPV

SEQ ID NO: 4293 - protein, 9 aa, synthetic construct
  REGION 1..9: note = Description of sequence: GPR137B-KMS_S3P from Experiment 5 of Table 10
KMPLANIYL

SEQ ID NO: 4294 - protein, 9 aa, synthetic construct
  REGION 1..9: note = Description of sequence: GPR174-FSF_P4S from Experiment 5 of Table 10
FSFSLDFLV

SEQ ID NO: 4295 - protein, 9 aa, synthetic construct
  REGION 1..9: note = Description of sequence: GSTA4-FLQ_E4K from Experiment 5 of Table 10
FLQKYTVKL

SEQ ID NO: 4296 - protein, 9 aa, synthetic construct
  REGION 1..9: note = Description of sequence: HAUS3-ILN_T7A from Experiment 5 of Table 10
ILNAMIAKI

SEQ ID NO: 4297 - protein, 9 aa, synthetic construct
  REGION 1..9: note = Description of sequence: HBZ-KLS_A7T from Experiment 5 of Table 10
KLSELHTYI

SEQ ID NO: 4298 - protein, 9 aa, synthetic construct
  REGION 1..9: note = Description of sequence: HERC1-SLL_PS from Experiment 5 of Table 10
SLLLLSVSV

SEQ ID NO: 4299 - protein, 9 aa, synthetic construct
  REGION 1..9: note = Description of sequence: HLA-DRB5-YMA_KE from Experiment 5 of Table 10
YMAELTVTL

SEQ ID NO: 4300 - protein, 9 aa, synthetic construct
  REGION 1..9: note = Description of sequence: HOXC9-YMY_G4D from Experiment 5 of Table 10
YMYDSPGEL

SEQ ID NO: 4301 - protein, 10 aa, synthetic construct
  REGION 1..10: note = Description of sequence: HTR1F-10_V1M from Experiment 5 of Table 10
MMPFSIVYIV

SEQ ID NO: 4302 - protein, 9 aa, synthetic construct
  REGION 1..9: note = Description of sequence: HTR1F-9_V1M from Experiment 5 of Table 10
MMPFSIVYI

SEQ ID NO: 4303 - protein, 10 aa, synthetic construct
  REGION 1..10: note = Description of sequence: HTR1F-LVM_V2M from Experiment 5 of Table 10
LMMPFSIVYI

SEQ ID NO: 4304 - protein, 10 aa, synthetic construct
  REGION 1..10: note = Description of sequence: IGF1-TMS_S4F from Experiment 5 of Table 10
TMSFSHLFYL

SEQ ID NO: 4305 - protein, 9 aa, synthetic construct
  REGION 1..9: note = Description of sequence: IL17RA-FIT_TM from Experiment 5 of Table 10
FIMGISILL

SEQ ID NO: 4306 - protein, 9 aa, synthetic construct
  REGION 1..9: note = Description of sequence: INTS1-VLL_L3F from Experiment 5 of Table 10
VLFHRAFLV

SEQ ID NO: 4307 - protein, 9 aa, synthetic construct
  REGION 1..9: note = Description of sequence: IPO9-FSS_E4D from Experiment 5 of Table 10
FSSDVLNLV

SEQ ID NO: 4308 - protein, 9 aa, synthetic construct
  REGION 1..9: note = Description of sequence: ITIH6-RLG_G3V from Experiment 5 of Table 10
RLVPYLEFL

SEQ ID NO: 4309 - protein, 9 aa, synthetic construct
  REGION 1..9: note = Description of sequence: KAT6A-KLS_MK from Experiment 5 of Table 10
KLSREIKPV

SEQ ID NO: 4310 - protein, 9 aa, synthetic construct
  REGION 1..9: note = Description of sequence: KCNB2-LLA_P6T from Experiment 5 of Table 10
LLAILTYYV

SEQ ID NO: 4311 - protein, 9 aa, synthetic construct
  REGION 1..9: note = Description of sequence: KCNC3-FLP_A7V from Experiment 5 of Table 10
FLPDLNVNA

SEQ ID NO: 4312 - protein, 9 aa, synthetic construct
  REGION 1..9: note = Description of sequence: KIF20B-YTS_S6L from Experiment 5 of Table 10
YTSEILSPI

SEQ ID NO: 4313 - protein, 9 aa, synthetic construct
  REGION 1..9: note = Description of sequence: LCP1-NLF_PL from Experiment 5 of Table 10
NLFNRYLAL

SEQ ID NO: 4314 - protein, 10 aa, synthetic construct
  REGION 1..10: note = Description of sequence: MAR11-10_F1L from Experiment 5 of Table 10
LLIASVTWLL

SEQ ID NO: 4315 - protein, 9 aa, synthetic construct
  REGION 1..9: note = Description of sequence: MAR11-9_F1L from Experiment 5 of Table 10
LLIASVTWL

SEQ ID NO: 4316 - protein, 9 aa, synthetic construct
  REGION 1..9: note = Description of sequence: ME1-FLD_A8G from Experiment 5 of Table 10
FLDEFMEGV

SEQ ID NO: 4317 - protein, 9 aa, synthetic construct
  REGION 1..9: note = Description of sequence: MLL2-ALS_L8H from Experiment 5 of Table 10
ALSPVIPHI

SEQ ID NO: 4318 - protein, 9 aa, synthetic construct
  REGION 1..9: note = Description of sequence: MPV17-YLW_A5P from Experiment 5 of Table 10
YLWPPVQLA

SEQ ID NO: 4319 - protein, 9 aa, synthetic construct
  REGION 1..9: note = Description of sequence: MRGPRF-RLW_R1W from Experiment 5 of Table 10
WLWEPLRVV

SEQ ID NO: 4320 - protein, 10 aa, synthetic construct
  REGION 1..10: note = Description of sequence: MRM1-10_T6P from Experiment 5 of Table 10
LLFGMPPCLL

SEQ ID NO: 4321 - protein, 9 aa, synthetic construct
  REGION 1..9: note = Description of sequence: MRM1-9_T6P from Experiment 5 of Table 10
LLFGMPPCL

SEQ ID NO: 4322 - protein, 9 aa, synthetic construct
  REGION 1..9: note = Description of sequence: MYH4-GLD_D3N from Experiment 5 of Table 10
GLNETIAKL

SEQ ID NO: 4323 - protein, 9 aa, synthetic construct
  REGION 1..9: note = Description of sequence: MYPN-RVI_R1L from Experiment 5 of Table 10
LVIGMPPPV

SEQ ID NO: 4324 - protein, 9 aa, synthetic construct
  REGION 1..9: note = Description of sequence: NBPF24-LLD_E6G from Experiment 5 of Table 10
LLDEKGPEV

SEQ ID NO: 4325 - protein, 9 aa, synthetic construct
  REGION 1..9: note = Description of sequence: NOS1-FID_D3Y from Experiment 5 of Table 10
FIYQYYSSI

SEQ ID NO: 4326 - protein, 9 aa, synthetic construct
  REGION 1..9: note = Description of sequence: NSDHL-ILT_A9V from Experiment 5 of Table 10
ILTGLNYEV

SEQ ID NO: 4327 - protein, 9 aa, synthetic construct
  REGION 1..9: note = Description of sequence: OASL-ILD_DN from Experiment 5 of Table 10
ILNPADPTL

SEQ ID NO: 4328 - protein, 9 aa, synthetic construct
  REGION 1..9: note = Description of sequence: OR10A3-ILI_V6F from Experiment 5 of Table 10
ILIVMFPFL

SEQ ID NO: 4329 - protein, 9 aa, synthetic construct
  REGION 1..9: note = Description of sequence: OR14C36-FML_V6L from Experiment 5 of Table 10
FMLYLLTLM

SEQ ID NO: 4330 - protein, 9 aa, synthetic construct
  REGION 1..9: note = Description of sequence: OR1G1-FLF_T8M from Experiment 5 of Table 10
FLFMYLVMV

SEQ ID NO: 4331 - protein, 9 aa, synthetic construct
  REGION 1..9: note = Description of sequence: OR2T1-FLN_F5L from Experiment 5 of Table 10
FLNVLFPLL

SEQ ID NO: 4332 - protein, 9 aa, synthetic construct
  REGION 1..9: note = Description of sequence: OR5K2-YIF_GE from Experiment 5 of Table 10
YIFLENLAL

SEQ ID NO: 4333 - protein, 9 aa, synthetic construct
  REGION 1..9: note = Description of sequence: OR5M3-KMV_T8N from Experiment 5 of Table 10
KMVAVFYNT

SEQ ID NO: 4334 - protein, 9 aa, synthetic construct
  REGION 1..9: note = Description of sequence: OR6F1-VLN_T8M from Experiment 5 of Table 10
VLNPFIYML

SEQ ID NO: 4335 - protein, 9 aa, synthetic construct
  REGION 1..9: note = Description of sequence: OR8B8-YVN_V2L from Experiment 5 of Table 10
YLNELVVFV

SEQ ID NO: 4336 - protein, 10 aa, synthetic construct
  REGION 1..10: note = Description of sequence: OR8D4-10_G3E from Experiment 5 of Table 10
FLEIYTVTVV

SEQ ID NO: 4337 - protein, 9 aa, synthetic construct
  REGION 1..9: note = Description of sequence: OR8D4-9_G3E from Experiment 5 of Table 10
FLEIYTVTV

SEQ ID NO: 4338 - protein, 9 aa, synthetic construct
  REGION 1..9: note = Description of sequence: OR9Q2-FLF_S8F from Experiment 5 of Table 10
FLFTFFAFI

SEQ ID NO: 4339 - protein, 9 aa, synthetic construct
  REGION 1..9: note = Description of sequence: OR9Q2-SID_S1F from Experiment 5 of Table 10
FIDCYLLAI

SEQ ID NO: 4340 - protein, 9 aa, synthetic construct
  REGION 1..9: note = Description of sequence: OVOL1-SLL_L9V from Experiment 5 of Table 10
SLLQGSPHV

SEQ ID NO: 4341 - protein, 9 aa, synthetic construct
  REGION 1..9: note = Description of sequence: PABPC1-MLG_R5Q from Experiment 5 of Table 10
MLGEQLFPL

SEQ ID NO: 4342 - protein, 9 aa, synthetic construct
  REGION 1..9: note = Description of sequence: PCDHB3-FLF_SL from Experiment 5 of Table 10
FLFLVLLFV

SEQ ID NO: 4343 - protein, 9 aa, synthetic construct
  REGION 1..9: note = Description of sequence: PELP1-LVL_L3F from Experiment 5 of Table 10
LVFPLVMGV

SEQ ID NO: 4344 - protein, 9 aa, synthetic construct
  REGION 1..9: note = Description of sequence: PELP1-RLH_L7F from Experiment 5 of Table 10
RLHDLVFPL

SEQ ID NO: 4345 - protein, 9 aa, synthetic construct
  REGION 1..9: note = Description of sequence: PGM5-AVG_H5Y from Experiment 5 of Table 10
AVGSYVYSV

SEQ ID NO: 4346 - protein, 9 aa, synthetic construct
  REGION 1..9: note = Description of sequence: PHKA2-LLS_SF from Experiment 5 of Table 10
LLSIIFFPA

SEQ ID NO: 4347 - protein, 9 aa, synthetic construct
  REGION 1..9: note = Description of sequence: PIGN-FLT_P7H from Experiment 5 of Table 10
FLTVFSHFM

SEQ ID NO: 4348 - protein, 9 aa, synthetic construct
  REGION 1..9: note = Description of sequence: PLXNB1-VLF_V1L from Experiment 5 of Table 10
LLFAAFSSA

SEQ ID NO: 4349 - protein, 9 aa, synthetic construct
  REGION 1..9: note = Description of sequence: PRSS16-LLL_L1Q from Experiment 5 of Table 10
QLLVSLWGL

SEQ ID NO: 4350 - protein, 9 aa, synthetic construct
  REGION 1..9: note = Description of sequence: PTCHD4-HQL_G5V from Experiment 5 of Table 10
HQLGVVVEV

SEQ ID NO: 4351 - protein, 9 aa, synthetic construct
  REGION 1..9: note = Description of sequence: PXDNL-SIL_S1F from Experiment 5 of Table 10
FILDAVQRV

SEQ ID NO: 4352 - protein, 9 aa, synthetic construct
  REGION 1..9: note = Description of sequence: REV3L-KLS_R6H from Experiment 5 of Table 10
KLSEYHNSL

SEQ ID NO: 4353 - protein, 10 aa, synthetic construct
  REGION 1..10: note = Description of sequence: RRP1B-LLA_L7F from Experiment 5 of Table 10
LLADQNFKFI

SEQ ID NO: 4354 - protein, 9 aa, synthetic construct
  REGION 1..9: note = Description of sequence: RYR3-VLN_E6K from Experiment 5 of Table 10
VLNYFKPYL

SEQ ID NO: 4355 - protein, 9 aa, synthetic construct
  REGION 1..9: note = Description of sequence: SCN3A-ALV_P7S from Experiment 5 of Table 10
ALVGAISSI

SEQ ID NO: 4356 - protein, 9 aa, synthetic construct
  REGION 1..9: note = Description of sequence: SEC24A-FLY_P5L from Experiment 5 of Table 10
FLYNLLTRV

SEQ ID NO: 4357 - protein, 9 aa, synthetic construct
  REGION 1..9: note = Description of sequence: SH3RF2-HMV_MI from Experiment 5 of Table 10
HIVEISTPV

SEQ ID NO: 4358 - protein, 9 aa, synthetic construct
  REGION 1..9: note = Description of sequence: SHROOM2-KLL_D6V from Experiment 5 of Table 10
KLLAGVEIV

SEQ ID NO: 4359 - protein, 10 aa, synthetic construct
  REGION 1..10: note = Description of sequence: SLC15A2-ILG_G4E from Experiment 5 of Table 10
ILGEQVVHTV

SEQ ID NO: 4360 - protein, 9 aa, synthetic construct
  REGION 1..9: note = Description of sequence: SLC16A7-AMA_P6L from Experiment 5 of Table 10
AMAGSLVFL

SEQ ID NO: 4361 - protein, 9 aa, synthetic construct
  REGION 1..9: note = Description of sequence: SLC1A2-YMS_S3P from Experiment 5 of Table 10
YMPTTIIAA

SEQ ID NO: 4362 - protein, 9 aa, synthetic construct
  REGION 1..9: note = Description of sequence: SLC2A3-ILV_L9M from Experiment 5 of Table 10
ILVAQIFGM

SEQ ID NO: 4363 - protein, 9 aa, synthetic construct
  REGION 1..9: note = Description of sequence: SLC2A4-ILI_A4T from Experiment 5 of Table 10
ILITQVLGL

SEQ ID NO: 4364 - protein, 10 aa, synthetic construct
  REGION 1..10: note = Description of sequence: SLC38A1-RIW_W3L from Experiment 5 of Table 10
RILAALFLGL

SEQ ID NO: 4365 - protein, 9 aa, synthetic construct
  REGION 1..9: note = Description of sequence: SLC39A4-LLG_G4S from Experiment 5 of Table 10
LLGSWTVLL

SEQ ID NO: 4366 - protein, 10 aa, synthetic construct
  REGION 1..10: note = Description of sequence: SMARCD3-KLF_H8Y from Experiment 5 of Table 10
KLFEFLVYGV

SEQ ID NO: 4367 - protein, 9 aa, synthetic construct
  REGION 1..9: note = Description of sequence: SMOX-KLA_KN from Experiment 5 of Table 10
KLANPLPYT

SEQ ID NO: 4368 - protein, 9 aa, synthetic construct
  REGION 1..9: note = Description of sequence: SNX24-KLS_P6L from Experiment 5 of Table 10
KLSHQLVLL

SEQ ID NO: 4369 - protein, 9 aa, synthetic construct
  REGION 1..9: note = Description of sequence: SPOPN147I-FLL_N7I from Experiment 5 of Table 10
FLLDEAIGL

SEQ ID NO: 4370 - protein, 9 aa, synthetic construct
  REGION 1..9: note = Description of sequence: SREBF1-YLQ_L6M from Experiment 5 of Table 10
YLQDSMATT

SEQ ID NO: 4371 - protein, 10 aa, synthetic construct
  REGION 1..10: note = Description of sequence: SSPN-10_S9F from Experiment 5 of Table 10
FLMASISSFL

SEQ ID NO: 4372 - protein, 9 aa, synthetic construct
  REGION 1..9: note = Description of sequence: SSPN-9_S9F from Experiment 5 of Table 10
FLMASISSF

SEQ ID NO: 4373 - protein, 9 aa, synthetic construct
  REGION 1..9: note = Description of sequence: SSPN-LMA_S8F from Experiment 5 of Table 10
LMASISSFL

SEQ ID NO: 4374 - protein, 9 aa, synthetic construct
  REGION 1..9: note = Description of sequence: ST6GALNAC2-LLF_Y6H from Experiment 5 of Table 10
LLFALHFSA

SEQ ID NO: 4375 - protein, 9 aa, synthetic construct
  REGION 1..9: note = Description of sequence: STOX1-RLM_M3I from Experiment 5 of Table 10
RLIKHYPGI

SEQ ID NO: 4376 - protein, 9 aa, synthetic construct
  REGION 1..9: note = Description of sequence: TAS1R2-FMS_A4S from Experiment 5 of Table 10
FMSSYSGVL

SEQ ID NO: 4377 - protein, 9 aa, synthetic construct
  REGION 1..9: note = Description of sequence: TBX3-GMG_T8M from Experiment 5 of Table 10
GMGPLLAMV

SEQ ID NO: 4378 - protein, 10 aa, synthetic construct
  REGION 1..10: note = Description of sequence: TEAD1-SVL_L9F from Experiment 5 of Table 10
SVLENFTIFL

SEQ ID NO: 4379 - protein, 10 aa, synthetic construct
  REGION 1..10: note = Description of sequence: TEAD1-VLE_L8F from Experiment 5 of Table 10
VLENFTIFLV

SEQ ID NO: 4380 - protein, 9 aa, synthetic construct
  REGION 1..9: note = Description of sequence: TEX2-FLM_K8N from Experiment 5 of Table 10
FLMTLETNM

SEQ ID NO: 4381 - protein, 10 aa, synthetic construct
  REGION 1..10: note = Description of sequence: TMEM127-VTF_L9V from Experiment 5 of Table 10
VTFAVSFYVV

SEQ ID NO: 4382 - protein, 9 aa, synthetic construct
  REGION 1..9: note = Description of sequence: TMEM195-ALS_S3L from Experiment 5 of Table 10
ALLQVTLLL

SEQ ID NO: 4383 - protein, 9 aa, synthetic construct
  REGION 1..9: note = Description of sequence: TP73-YTP_P3S from Experiment 5 of Table 10
YTSEHAASV

SEQ ID NO: 4384 - protein, 9 aa, synthetic construct
  REGION 1..9: note = Description of sequence: TPP2-SLA_WL from Experiment 5 of Table 10
SLAETFLET

SEQ ID NO: 4385 - protein, 9 aa, synthetic construct
  REGION 1..9: note = Description of sequence: TRIM16-RMA_R1T from Experiment 5 of Table 10
TMAAISNTV

SEQ ID NO: 4386 - protein, 9 aa, synthetic construct
  REGION 1..9: note = Description of sequence: TRIM58-VLA_V1F from Experiment 5 of Table 10
FLASPSVPL

SEQ ID NO: 4387 - protein, 9 aa, synthetic construct
  REGION 1..9: note = Description of sequence: TRIM58-YMV_V3F from Experiment 5 of Table 10
YMFLASPSV

SEQ ID NO: 4388 - protein, 9 aa, synthetic construct
  REGION 1..9: note = Description of sequence: TRPC1-MLL_Q5H from Experiment 5 of Table 10
MLLKHDVSL

SEQ ID NO: 4389 - protein, 9 aa, synthetic construct
  REGION 1..9: note = Description of sequence: TRPV3-LLL_A8V from Experiment 5 of Table 10
LLLNMLIVL

SEQ ID NO: 4390 - protein, 9 aa, synthetic construct
  REGION 1..9: note = Description of sequence: TRPV4-FMI_A6T from Experiment 5 of Table 10
FMIGYTSAL

SEQ ID NO: 4391 - protein, 9 aa, synthetic construct
  REGION 1..9: note = Description of sequence: TRPV4-YLL_A9T from Experiment 5 of Table 10
YLLFMIGYT

SEQ ID NO: 4392 - protein, 9 aa, synthetic construct
  REGION 1..9: note = Description of sequence: TTLL12-KLP_N7D from Experiment 5 of Table 10
KLPLDIDPV

SEQ ID NO: 4393 - protein, 9 aa, synthetic construct
  REGION 1..9: note = Description of sequence: UNC13A-SQL_S1F from Experiment 5 of Table 10
FQLNQSFEI

SEQ ID NO: 4394 - protein, 9 aa, synthetic construct
  REGION 1..9: note = Description of sequence: USP28-LII_C5F from Experiment 5 of Table 10
LIIPFIHLI

SEQ ID NO: 4395 - protein, 9 aa, synthetic construct
  REGION 1..9: note = Description of sequence: VN1R2-LML_L3F from Experiment 5 of Table 10
LMFWASSSI

SEQ ID NO: 4396 - protein, 9 aa, synthetic construct
  REGION 1..9: note = Description of sequence: VN1R5-MII_S7Y from Experiment 5 of Table 10
MIISHLYLI

SEQ ID NO: 4397 - protein, 9 aa, synthetic construct
  REGION 1..9: note = Description of sequence: WDR46-FLT_T3I from Experiment 5 of Table 10
FLIYLDVSV

SEQ ID NO: 4398 - protein, 9 aa, synthetic construct
  REGION 1..9: note = Description of sequence: ZDHHC17-LLL_T4I from Experiment 5 of Table 10
LLLIFNVSV

SEQ ID NO: 4399 - protein, 9 aa, synthetic construct
  REGION 1..9: note = Description of sequence: ZDHHC7-SLL_P7L from Experiment 5 of Table 10
SLLWMNLFV

SEQ ID NO: 4400 - protein, 9 aa, synthetic construct
  REGION 1..9: note = Description of sequence: ZFP90-FTQ_EK from Experiment 5 of Table 10
FTQEKWYHV

SEQ ID NO: 4401 - protein, 9 aa, synthetic construct
  REGION 1..9: note = Description of sequence: ZNF827-NLF_S4I from Experiment 5 of Table 10
NLFIQDISV

SEQ ID NO: 4402 - protein, 10 aa, synthetic construct
  REGION 1..10: note = Description of sequence: HCV-KLV (PE) from Experiment 5 of Table 10
KLVALGINAV

SEQ ID NO: 4403 - protein, 10 aa, synthetic construct
  REGION 1..10: note = Description of sequence: HCV-KLV (APC) from Experiment 5 of Table 10
KLVALGINAV

SEQ ID NO: 4404-4405 - skipped (2 entries)

SEQ ID NO: 4406 - protein, 13 aa, synthetic construct
  REGION 1..13: note = Description of sequence: CDR3 from FIG. 20A and 20B
CAARPDSNYQLIW

SEQ ID NO: 4407 - protein, 14 aa, synthetic construct
  REGION 1..14: note = Description of sequence: CDR3 from FIG. 20A and 20B
CATDDSGGYQKVTF

SEQ ID NO: 4408 - protein, 13 aa, synthetic construct
  REGION 1..13: note = Description of sequence: CDR3 from FIG. 20A and 20B
CAAPGNYGQNFVF

SEQ ID NO: 4409 - protein, 15 aa, synthetic construct
  REGION 1..15: note = Description of sequence: CDR3 from FIG. 20A and 20B
CAAYRSGAGSYQLTF

SEQ ID NO: 4410 - protein, 12 aa, synthetic construct
  REGION 1..12: note = Description of sequence: CDR3 from FIG. 20A and 20B
CAFYNQGGKLIF

SEQ ID NO: 4411 - protein, 13 aa, synthetic construct
  REGION 1..13: note = Description of sequence: CDR3 from FIG. 20A and 20B
CAALTDSWGKLQF

SEQ ID NO: 4412 - protein, 14 aa, synthetic construct
  REGION 1..14: note = Description of sequence: CDR3 from FIG. 20A and 20B
CAVISGGGADGLTF

SEQ ID NO: 4413 - protein, 11 aa, synthetic construct
  REGION 1..11: note = Description of sequence: CDR3 from FIG. 20A and 20B
CALEAGNKLTF

SEQ ID NO: 4414 - protein, 15 aa, synthetic construct
  REGION 1..15: note = Description of sequence: CDR3 from FIG. 20A and 20B
CAVSESRNRDDKIIF

SEQ ID NO: 4415 - protein, 12 aa, synthetic construct
  REGION 1..12: note = Description of sequence: CDR3 from FIG. 20A and 20B
CASSQGGDEQFF

SEQ ID NO: 4416 - protein, 19 aa, synthetic construct
  REGION 1..19: note = Description of sequence: CDR3 from FIG. 20A and 20B
CASSQDPLLEGYSYNEQFF

SEQ ID NO: 4417 - protein, 15 aa, synthetic construct
  REGION 1..15: note = Description of sequence: CDR3 from FIG. 20A and 20B
CASSGELRGAEKLFF

SEQ ID NO: 4418 - protein, 13 aa, synthetic construct
  REGION 1..13: note = Description of sequence: CDR3 from FIG. 20A and 20B
CASSYGGEQPQHF

SEQ ID NO: 4419 - protein, 14 aa, synthetic construct
  REGION 1..14: note = Description of sequence: CDR3 from FIG. 20A and 20B
CASSNGYGNQPQHF

SEQ ID NO: 4420 - protein, 14 aa, synthetic construct
  REGION 1..14: note = Description of sequence: CDR3 from FIG. 20A and 20B
CASSVEGVADEQYF

SEQ ID NO: 4421 - protein, 16 aa, synthetic construct
  REGION 1..16: note = Description of sequence: CDR3 from FIG. 20A and 20B
CASSDLQGGGPGEQYF

SEQ ID NO: 4422 - protein, 14 aa, synthetic construct
  REGION 1..14: note = Description of sequence: CDR3 from FIG. 20A and 20B
CASSVEGVADTQYF

SEQ ID NO: 4423 - protein, 14 aa, synthetic construct
  REGION 1..14: note = Description of sequence: CDR3 from FIG. 20A and 20B
CASSSTGALYEQYF

SEQ ID NO: 4424 - protein, 13 aa, synthetic construct
  REGION 1..13: note = Description of sequence: CDR3 from FIG. 20A and 20B
CASTIALGYEQYF

SEQ ID NO: 4425 - protein, 13 aa, synthetic construct
  REGION 1..13: note = Description of sequence: CDR3 from FIG. 20A and 20B
CASSSGGGNEQFF
